United States Patent Application Publication US 2024/0252682 A1 - sequence listing, part 6

SEQ ID NO: 7277 - protein, 2096 aa, synthetic construct
MPAAKRVKLDGGDKKYSIGLDIGTNSVGWAVITDEYKVPSKKFKVLGNTDRHSIKKNLIGALLFDSGETAEATRLKRTARRRYTRRKNRICYLQEIFSNEMAKVDDSFFHRLEESFLVEEDKKHERHPIFGNIVDEVAYHEKYPTIYHLRKKLVDSTDKADLRLIYLALAHMIKFRGHFLIEGDLNPDNSDVDKLFIQLVQTYNQLFEENPINASGVDAKAILSARLSKSRRLENLIAQLPGEKKNGLFGNLIALSLGLTPNFKSNFDLAEDAKLQLSKDTYDDDLDNLLAQIGDQYADLFLAAKNLSDAILLSDILRVNTEITKAPLSASMIKRYDEHHQDLTLLKALVRQQLPEKYKEIFFDQSKNGYAGYIDGGASQEEFYKFIKPILEKMDGTEELLVKLNREDLLRKQRTFDNGSIPHQIHLGELHAILRRQEDFYPFLKDNREKIEKILTFRIPYYVGPLARGNSRFAWMTRKSEETITPWNFEEVVDKGASAQSFIERMTNFDKNLPNEKVLPKHSLLYEYFTVYNELTKVKYVTEGMRKPAFLSGEQKKAIVDLLFKTNRKVTVKQLKEDYFKKIECFDSVEISGVEDRFNASLGTYHDLLKIIKDKDFLDNEENEDILEDIVLTLTLFEDREMIEERLKTYAHLFDDKVMKQLKRRRYTGWGRLSRKLINGIRDKQSGKTILDFLKSDGFANRNFMQLIHDDSLTFKEDIQKAQVSGQGDSLHEHIANLAGSPAIKKGILQTVKVVDELVKVMGRHKPENIVIEMARENQTTQKGQKNSRERMKRIEEGIKELGSQILKEHPVENTQLQNEKLYLYYLQNGRDMYVDQELDINRLSDYDVDHIVPQSFLKDDSIDNKVLTRSDKARGKSDNVPSEEVVKKMKNYWRQLLNAKLITQRKFDNLTKAERGGLSELDKAGFIKRQLVETRQITKHVAQILDSRMNTKYDENDKLIREVKVITLKSKLVSDFRKDFQFYKVREINNYHHAHDAYLNAVVGTALIKKYPKLESEFVYGDYKVYDVRKMIAKSEQEIGKATAKYFFYSNIMNFFKTEITLANGEIRKRPLIETNGETGEIVWDKGRDFATVRKVLSMPQVNIVKKTEVQTGGFSKESILPKRNSDKLIARKKDWDPKKYGGFDSPTVAYSVLVVAKVEKGKSKKLKSVKELLGITIMERSSFEKNPIDFLEAKGYKEVKKDLIIKLPKYSLFELENGRKRMLASAGELQKGNELALPSKYVNFLYLASHYEKLKGSPEDNEQKQLFVEQHKHYLDEIIEQISEFSKRVILADANLDKVLSAYNKHRDKPIREQAENIIHLFTLTNLGAPAAFKYFDTTIDRKRYTSTKEVLDATLIHQSITGLYETRIDLSQLGGDGGGGGGSSEAAAKGGTLNIEDEHRLHETSKEPDVSLGSTWLSDFPQAWAETGGMGLAVRQAPLIIPLKATSTPVSIKQYPMSQEARLGIKPHIQRLLDQGILVPCQSPWNTPLLPVKKPGTNDYRPVQDLREVNKRVEDIHPTVPNPYNLLSGLPPSHQWYTVLDLKDAFFCLRLHPTSQPLFAFEWRDPEMGISGQLTWTRLPQGFKNSPTLFDEALHRDLADFRIQHPDLILLQYVDDLLLAATSELDCQQGTRALLQTLGNLGYRASAKKAQICQKQVKYLGYLLKEGQRWLTEARKETVMGQPTPKTPRQLREFLGTAGFCRLWIPGFAEMAAPLYPLTKTGTLFNWGPDQQKAYQEIKQALLTAPALGLPDLTKPFELFVDEKQGYAKGVLTQKLGPWRRPVAYLSKKLDPVAAGWPPCLRMVAAIAVLTKDAGKLTMGQPLVILAPHAVEALVKQPPDRWLSNARMTHYQALLLDTDRVQFGPVVALNPATLLPLPEEGLQHNCLDILAEAHGTRPDLTDQPLPDADHTWYTDGSSLLQEGQRKAGAAVTTETEVIWAKALPAGTSAQRAELIALTQALKMAEGKKLNVYTDSRYAFATAHIHGEIYRRRGLLTSEGKEIKNKDEILALLKALFLPKRLSIIHCPGHQKGHSAEARGNRMADQAARKAAITETPDTSTLLAGKRTADGSEFEKRTADGSEFESPKKKAKVE

SEQ ID NO: 7278 - protein, 2088 aa, synthetic construct
MPAAKRVKLDGGDKKYSIGLDIGTNSVGWAVITDEYKVPSKKFKVLGNTDRHSIKKNLIGALLFDSGETAEATRLKRTARRRYTRRKNRICYLQEIFSNEMAKVDDSFFHRLEESFLVEEDKKHERHPIFGNIVDEVAYHEKYPTIYHLRKKLVDSTDKADLRLIYLALAHMIKFRGHFLIEGDLNPDNSDVDKLFIQLVQTYNQLFEENPINASGVDAKAILSARLSKSRRLENLIAQLPGEKKNGLFGNLIALSLGLTPNFKSNFDLAEDAKLQLSKDTYDDDLDNLLAQIGDQYADLFLAAKNLSDAILLSDILRVNTEITKAPLSASMIKRYDEHHQDLTLLKALVRQQLPEKYKEIFFDQSKNGYAGYIDGGASQEEFYKFIKPILEKMDGTEELLVKLNREDLLRKQRTFDNGSIPHQIHLGELHAILRRQEDFYPFLKDNREKIEKILTFRIPYYVGPLARGNSRFAWMTRKSEETITPWNFEEVVDKGASAQSFIERMTNFDKNLPNEKVLPKHSLLYEYFTVYNELTKVKYVTEGMRKPAFLSGEQKKAIVDLLFKTNRKVTVKQLKEDYFKKIECFDSVEISGVEDRFNASLGTYHDLLKIIKDKDFLDNEENEDILEDIVLTLTLFEDREMIEERLKTYAHLFDDKVMKQLKRRRYTGWGRLSRKLINGIRDKQSGKTILDFLKSDGFANRNFMQLIHDDSLTFKEDIQKAQVSGQGDSLHEHIANLAGSPAIKKGILQTVKVVDELVKVMGRHKPENIVIEMARENQTTQKGQKNSRERMKRIEEGIKELGSQILKEHPVENTQLQNEKLYLYYLQNGRDMYVDQELDINRLSDYDVDHIVPQSFLKDDSIDNKVLTRSDKARGKSDNVPSEEVVKKMKNYWRQLLNAKLITQRKFDNLTKAERGGLSELDKAGFIKRQLVETRQITKHVAQILDSRMNTKYDENDKLIREVKVITLKSKLVSDFRKDFQFYKVREINNYHHAHDAYLNAVVGTALIKKYPKLESEFVYGDYKVYDVRKMIAKSEQEIGKATAKYFFYSNIMNFFKTEITLANGEIRKRPLIETNGETGEIVWDKGRDFATVRKVLSMPQVNIVKKTEVQTGGFSKESILPKRNSDKLIARKKDWDPKKYGGFDSPTVAYSVLVVAKVEKGKSKKLKSVKELLGITIMERSSFEKNPIDFLEAKGYKEVKKDLIIKLPKYSLFELENGRKRMLASAGELQKGNELALPSKYVNFLYLASHYEKLKGSPEDNEQKQLFVEQHKHYLDEIIEQISEFSKRVILADANLDKVLSAYNKHRDKPIREQAENIIHLFTLTNLGAPAAFKYFDTTIDRKRYTSTKEVLDATLIHQSITGLYETRIDLSQLGGDGGGGGGSSEAAAKGGLDDEYRLYSPLVKPDQNIQFWLEQFPQAWAETAGMGLAKQVPPQVIQLKASATPVSVRQYPLSKEAQEGIRPHVQRLIQQGILVPVQSPWNTPLLPVRKPGTNDYRPVQDLREVNKRVQDIHPTVPNPYNLLCALPPQRSWYTVLDLKDAFFCLRLHPTSQPLFAFEWRDPGTGRTGQLTWTRLPQGFKNSPTIFNEALHRDLANFRIQHPQVTLLQYVDDLLLAGATKQDCLEGTKALLLELSDLGYRASAKKAQICRREVTYLGYSLRDGQRWLTEARKKTVVQIPAPTTAKQVREFLGKAGFCRLFIPGFATLAAPLYPLTKPKGEFSWAPEHQKAFDAIKKALLSAPALALPDVTKPFTLYVDERKGVARGVLTQTLGPWRRPVAYLSKKLDPVASGWPVCLKAIAAVAILVKDADKLTLGQNITVIAPHALENIVRQPPDRWMTNARMTHYQSLLLTERVTFAPPAALNPATLLPEETDEPVTHDCHQLLIEETGVRKDLTDIPLTGEVLTWFTDGSSYVVEGKRMAGAAVVDGTRTIWASSLPEGTSAQKAELMALTQALRLAEGKSINIYTDSRYAFATAHVHGAIYKQRGWLTSAGREIKNKEEILSLLEALHLPKRLAIIHCPGHQKAKDPISRGNQMADRVAKQAAQGVNLLPAGKRTADGSEFEKRTADGSEFESPKKKAKVE

SEQ ID NO: 7279 - protein, 2088 aa, synthetic construct; identical to SEQ ID NO: 7278

SEQ ID NO: 7280 - protein, 2090 aa, synthetic construct
MPAAKRVKLDGGDKKYSIGLDIGTNSVGWAVITDEYKVPSKKFKVLGNTDRHSIKKNLIGALLFDSGETAEATRLKRTARRRYTRRKNRICYLQEIFSNEMAKVDDSFFHRLEESFLVEEDKKHERHPIFGNIVDEVAYHEKYPTIYHLRKKLVDSTDKADLRLIYLALAHMIKFRGHFLIEGDLNPDNSDVDKLFIQLVQTYNQLFEENPINASGVDAKAILSARLSKSRRLENLIAQLPGEKKNGLFGNLIALSLGLTPNFKSNFDLAEDAKLQLSKDTYDDDLDNLLAQIGDQYADLFLAAKNLSDAILLSDILRVNTEITKAPLSASMIKRYDEHHQDLTLLKALVRQQLPEKYKEIFFDQSKNGYAGYIDGGASQEEFYKFIKPILEKMDGTEELLVKLNREDLLRKQRTFDNGSIPHQIHLGELHAILRRQEDFYPFLKDNREKIEKILTFRIPYYVGPLARGNSRFAWMTRKSEETITPWNFEEVVDKGASAQSFIERMTNFDKNLPNEKVLPKHSLLYEYFTVYNELTKVKYVTEGMRKPAFLSGEQKKAIVDLLFKTNRKVTVKQLKEDYFKKIECFDSVEISGVEDRFNASLGTYHDLLKIIKDKDFLDNEENEDILEDIVLTLTLFEDREMIEERLKTYAHLFDDKVMKQLKRRRYTGWGRLSRKLINGIRDKQSGKTILDFLKSDGFANRNFMQLIHDDSLTFKEDIQKAQVSGQGDSLHEHIANLAGSPAIKKGILQTVKVVDELVKVMGRHKPENIVIEMARENQTTQKGQKNSRERMKRIEEGIKELGSQILKEHPVENTQLQNEKLYLYYLQNGRDMYVDQELDINRLSDYDVDHIVPQSFLKDDSIDNKVLTRSDKARGKSDNVPSEEVVKKMKNYWRQLLNAKLITQRKFDNLTKAERGGLSELDKAGFIKRQLVETRQITKHVAQILDSRMNTKYDENDKLIREVKVITLKSKLVSDFRKDFQFYKVREINNYHHAHDAYLNAVVGTALIKKYPKLESEFVYGDYKVYDVRKMIAKSEQEIGKATAKYFFYSNIMNFFKTEITLANGEIRKRPLIETNGETGEIVWDKGRDFATVRKVLSMPQVNIVKKTEVQTGGFSKESILPKRNSDKLIARKKDWDPKKYGGFDSPTVAYSVLVVAKVEKGKSKKLKSVKELLGITIMERSSFEKNPIDFLEAKGYKEVKKDLIIKLPKYSLFELENGRKRMLASAGELQKGNELALPSKYVNFLYLASHYEKLKGSPEDNEQKQLFVEQHKHYLDEIIEQISEFSKRVILADANLDKVLSAYNKHRDKPIREQAENIIHLFTLTNLGAPAAFKYFDTTIDRKRYTSTKEVLDATLIHQSITGLYETRIDLSQLGGDGGGGGGSSEAAAKGGTLQLDDEYRLYSPLVKPDQNIQFWLEQFPQAWAETAGMGLAKQVPPQVIQLKASATPVSVRQYPLSKEAQEGIRPHVQRLIQQGILVPVQSPWNTPLLPVRKPGTNDYRPVQDLREVNKRVQDIHPTVPNPYNLLCALPPQRSWYTVLDLKDAFFCLRLHPTSQPLFAFEWRDPGTGRTGQLTWTRLPQGFKNSPTIFDEALHRDLANFRIQHPQVTLLQYVDDLLLAGATKQDCLEGTKALLLELSDLGYRASAKKAQICRREVTYLGYSLRDGQRWLTEARKKTVVQIPAPTTAKQVREFLGTAGFCRLWIPGFATLAAPLYPLTKEKGEFSWAPEHQKAFDAIKKALLSAPALALPDVTKPFTLYVDERKGVARGVLTQTLGPWRRPVAYLSKKLDPVASGWPVCLKAIAAVAILVKDADKLTLGQNITVIAPHALENIVRQPPDRWMTNARMTHYQSLLLTERVTFAPPAALNPATLLPEETDEPVTHDCHQLLIEETGVRKDLTDIPLTGEVLTWFTDGSSYVVEGKRMAGAAVVDGTRTIWASSLPEGTSAQKAELMALTQALRLAEGKSINIYTDSRYAFATAHVHGAIYKQRGLLTSAGREIKNKEEILSLLEALHLPKRLAIIHCPGHQKAKDPISRGNQMADRVAKQAAQGVNLLAGKRTADGSEFEKRTADGSEFESPKKKAKVE

SEQ ID NO: 7281 - protein, 2094 aa, synthetic construct
MPAAKRVKLDGGDKKYSIGLDIGTNSVGWAVITDEYKVPSKKFKVLGNTDRHSIKKNLIGALLFDSGETAEATRLKRTARRRYTRRKNRICYLQEIFSNEMAKVDDSFFHRLEESFLVEEDKKHERHPIFGNIVDEVAYHEKYPTIYHLRKKLVDSTDKADLRLIYLALAHMIKFRGHFLIEGDLNPDNSDVDKLFIQLVQTYNQLFEENPINASGVDAKAILSARLSKSRRLENLIAQLPGEKKNGLFGNLIALSLGLTPNFKSNFDLAEDAKLQLSKDTYDDDLDNLLAQIGDQYADLFLAAKNLSDAILLSDILRVNTEITKAPLSASMIKRYDEHHQDLTLLKALVRQQLPEKYKEIFFDQSKNGYAGYIDGGASQEEFYKFIKPILEKMDGTEELLVKLNREDLLRKQRTFDNGSIPHQIHLGELHAILRRQEDFYPFLKDNREKIEKILTFRIPYYVGPLARGNSRFAWMTRKSEETITPWNFEEVVDKGASAQSFIERMTNFDKNLPNEKVLPKHSLLYEYFTVYNELTKVKYVTEGMRKPAFLSGEQKKAIVDLLFKTNRKVTVKQLKEDYFKKIECFDSVEISGVEDRFNASLGTYHDLLKIIKDKDFLDNEENEDILEDIVLTLTLFEDREMIEERLKTYAHLFDDKVMKQLKRRRYTGWGRLSRKLINGIRDKQSGKTILDFLKSDGFANRNFMQLIHDDSLTFKEDIQKAQVSGQGDSLHEHIANLAGSPAIKKGILQTVKVVDELVKVMGRHKPENIVIEMARENQTTQKGQKNSRERMKRIEEGIKELGSQILKEHPVENTQLQNEKLYLYYLQNGRDMYVDQELDINRLSDYDVDHIVPQSFLKDDSIDNKVLTRSDKARGKSDNVPSEEVVKKMKNYWRQLLNAKLITQRKFDNLTKAERGGLSELDKAGFIKRQLVETRQITKHVAQILDSRMNTKYDENDKLIREVKVITLKSKLVSDFRKDFQFYKVREINNYHHAHDAYLNAVVGTALIKKYPKLESEFVYGDYKVYDVRKMIAKSEQEIGKATAKYFFYSNIMNFFKTEITLANGEIRKRPLIETNGETGEIVWDKGRDFATVRKVLSMPQVNIVKKTEVQTGGFSKESILPKRNSDKLIARKKDWDPKKYGGFDSPTVAYSVLVVAKVEKGKSKKLKSVKELLGITIMERSSFEKNPIDFLEAKGYKEVKKDLIIKLPKYSLFELENGRKRMLASAGELQKGNELALPSKYVNFLYLASHYEKLKGSPEDNEQKQLFVEQHKHYLDEIIEQISEFSKRVILADANLDKVLSAYNKHRDKPIREQAENIIHLFTLTNLGAPAAFKYFDTTIDRKRYTSTKEVLDATLIHQSITGLYETRIDLSQLGGDGGGGGGSSEAAAKGGVLNLEEEYRLHEKPVPSSIDPSWLQLFPTVWAERAGMGLANQVPPVVVELRSGASPVAVRQYPMSKEAREGIRPHIQRFLDLGVLVPCQSPWNTPLLPVKKPGTNDYRPVQDLREINKRVQDIHPTVPNPYNLLSSLPPSHTWYSVLDLKDAFFCLKLHPNSQPLFAFEWRDPEKGNTGQLTWTRLPQGFKNSPTLFNEALHRDLAPFRALNPQVVLLQYVDDLLVAAPTYRDCKEGTQKLLQELSKLGYRVSAKKAQLCQKEVTYLGYLLKEGKRWLTPARKATVMKIPPPTTPRQVREFLGKAGFCRLFIPGFASLAAPLYPLTKPSIPFIWTEEHQKAFDRIKEALLSAPALALPDLTKPFTLYVDERAGVARGVLTQTLGPWRRPVAYLSKKLDPVASGWPTCLKAVAAVALLLKDADKLTLGQNVTVIASHSLESIVRQPPDRWMTNARMTHYQSLLLNERVSFAPPAVLNPATLLPVESEATPVHRCSEILAEETGTRRDLKDQPLPGVPAWYTDGSSFIAEGKRRAGAAIVDGKRTVWASSLPEGTSAQKAELVALTQALRLAEGKDINIYTDSRYAFATAHIHGAIYKQRGWLTSAGKDIKNKEEILALLEAIHLPKRVAIIHCPGHQKGNDPVATGNRRADEAAKQAALSTRVLAETTKPAGKRTADGSEFEKRTADGSEFESPKKKAKVE

SEQ ID NO: 7282 - protein, 2096 aa, synthetic construct
MPAAKRVKLDGGDKKYSIGLDIGTNSVGWAVITDEYKVPSKKFKVLGNTDRHSIKKNLIGALLFDSGETAEATRLKRTARRRYTRRKNRICYLQEIFSNEMAKVDDSFFHRLEESFLVEEDKKHERHPIFGNIVDEVAYHEKYPTIYHLRKKLVDSTDKADLRLIYLALAHMIKFRGHFLIEGDLNPDNSDVDKLFIQLVQTYNQLFEENPINASGVDAKAILSARLSKSRRLENLIAQLPGEKKNGLFGNLIALSLGLTPNFKSNFDLAEDAKLQLSKDTYDDDLDNLLAQIGDQYADLFLAAKNLSDAILLSDILRVNTEITKAPLSASMIKRYDEHHQDLTLLKALVRQQLPEKYKEIFFDQSKNGYAGYIDGGASQEEFYKFIKPILEKMDGTEELLVKLNREDLLRKQRTFDNGSIPHQIHLGELHAILRRQEDFYPFLKDNREKIEKILTFRIPYYVGPLARGNSRFAWMTRKSEETITPWNFEEVVDKGASAQSFIERMTNFDKNLPNEKVLPKHSLLYEYFTVYNELTKVKYVTEGMRKPAFLSGEQKKAIVDLLFKTNRKVTVKQLKEDYFKKIECFDSVEISGVEDRFNASLGTYHDLLKIIKDKDFLDNEENEDILEDIVLTLTLFEDREMIEERLKTYAHLFDDKVMKQLKRRRYTGWGRLSRKLINGIRDKQSGKTILDFLKSDGFANRNFMQLIHDDSLTFKEDIQKAQVSGQGDSLHEHIANLAGSPAIKKGILQTVKVVDELVKVMGRHKPENIVIEMARENQTTQKGQKNSRERMKRIEEGIKELGSQILKEHPVENTQLQNEKLYLYYLQNGRDMYVDQELDINRLSDYDVDHIVPQSFLKDDSIDNKVLTRSDKARGKSDNVPSEEVVKKMKNYWRQLLNAKLITQRKFDNLTKAERGGLSELDKAGFIKRQLVETRQITKHVAQILDSRMNTKYDENDKLIREVKVITLKSKLVSDFRKDFQFYKVREINNYHHAHDAYLNAVVGTALIKKYPKLESEFVYGDYKVYDVRKMIAKSEQEIGKATAKYFFYSNIMNFFKTEITLANGEIRKRPLIETNGETGEIVWDKGRDFATVRKVLSMPQVNIVKKTEVQTGGFSKESILPKRNSDKLIARKKDWDPKKYGGFDSPTVAYSVLVVAKVEKGKSKKLKSVKELLGITIMERSSFEKNPIDFLEAKGYKEVKKDLIIKLPKYSLFELENGRKRMLASAGELQKGNELALPSKYVNFLYLASHYEKLKGSPEDNEQKQLFVEQHKHYLDEIIEQISEFSKRVILADANLDKVLSAYNKHRDKPIREQAENIIHLFTLTNLGAPAAFKYFDTTIDRKRYTSTKEVLDATLIHQSITGLYETRIDLSQLGGDGGGGGGSSEAAAKGGTLNIEDEYRLHETSKEPDVPLGSTWLSDFPQAWAETGGMGLAVRQAPLIIPLKATSTPVSIKQYPMSQEARLGIKPHIQRLLDQGILVPCQSPWNTPLLPVKKPGTNDYRPVQDLREVNKRVEDIHPTVPNPYNLLSGLPPSHQWYTVLDLKDAFFCLRLHPTSQPLFAFEWRDPEMGISGQLTWTRLPQGFKNSPTLFNEALHRDLADFRIQHPDLILLQYVDDLLLAATSEQDCQRGTRALLQTLGNLGYRASAKKAQICQKQVKYLGYLLKEGQRWLTEARKETVMGQPTPKTPRQLREFLGTAGFCRLWIPGFAEMAAPLYPLTKPGTLFNWGPDQQKAYQEIKQALLTAPALGLPDLTKPFELFVDEKQGYAKGVLTQKLGPWRRPVAYLSKKLDPVAAGWPPCLRMVAAIAVLTKDAGKLTMGQPLVILAPHAVEALVKQPPDRWLSNARMTHYQAMLLDTDRVQFGPVVALNPATLLPLPEKEAPHDCLEILAETHGTRPDLTDQPIPDADYTWYTDGSSFLQEGQRRAGAAVTTETEVIWARALPAGTSAQRAELIALTQALKMAEGKKLNVYTDSRYAFATAHVHGEIYRRRGWLTSEGREIKNKNEILALLKALFLPKRLSIIHCPGHQKGNSAEARGNRMADQAAREAAMKAVLETSTLLAGKRTADGSEFEKRTADGSEFESPKKKAKVE

SEQ ID NO: 7283 - protein, 2173 aa, synthetic construct
MPAAKRVKLDGGDKKYSIGLDIGTNSVGWAVITDEYKVPSKKFKVLGNTDRHSIKKNLIGALLFDSGETAEATRLKRTARRRYTRRKNRICYLQEIFSNEMAKVDDSFFHRLEESFLVEEDKKHERHPIFGNIVDEVAYHEKYPTIYHLRKKLVDSTDKADLRLIYLALAHMIKFRGHFLIEGDLNPDNSDVDKLFIQLVQTYNQLFEENPINASGVDAKAILSARLSKSRRLENLIAQLPGEKKNGLFGNLIALSLGLTPNFKSNFDLAEDAKLQLSKDTYDDDLDNLLAQIGDQYADLFLAAKNLSDAILLSDILRVNTEITKAPLSASMIKRYDEHHQDLTLLKALVRQQLPEKYKEIFFDQSKNGYAGYIDGGASQEEFYKFIKPILEKMDGTEELLVKLNREDLLRKQRTFDNGSIPHQIHLGELHAILRRQEDFYPFLKDNREKIEKILTFRIPYYVGPLARGNSRFAWMTRKSEETITPWNFEEVVDKGASAQSFIERMTNFDKNLPNEKVLPKHSLLYEYFTVYNELTKVKYVTEGMRKPAFLSGEQKKAIVDLLFKTNRKVTVKQLKEDYFKKIECFDSVEISGVEDRFNASLGTYHDLLKIIKDKDFLDNEENEDILEDIVLTLTLFEDREMIEERLKTYAHLFDDKVMKQLKRRRYTGWGRLSRKLINGIRDKQSGKTILDFLKSDGFANRNFMQLIHDDSLTFKEDIQKAQVSGQGDSLHEHIANLAGSPAIKKGILQTVKVVDELVKVMGRHKPENIVIEMARENQTTQKGQKNSRERMKRIEEGIKELGSQILKEHPVENTQLQNEKLYLYYLQNGRDMYVDQELDINRLSDYDVDHIVPQSFLKDDSIDNKVLTRSDKARGKSDNVPSEEVVKKMKNYWRQLLNAKLITQRKFDNLTKAERGGLSELDKAGFIKRQLVETRQITKHVAQILDSRMNTKYDENDKLIREVKVITLKSKLVSDFRKDFQFYKVREINNYHHAHDAYLNAVVGTALIKKYPKLESEFVYGDYKVYDVRKMIAKSEQEIGKATAKYFFYSNIMNFFKTEITLANGEIRKRPLIETNGETGEIVWDKGRDFATVRKVLSMPQVNIVKKTEVQTGGFSKESILPKRNSDKLIARKKDWDPKKYGGFDSPTVAYSVLVVAKVEKGKSKKLKSVKELLGITIMERSSFEKNPIDFLEAKGYKEVKKDLIIKLPKYSLFELENGRKRMLASAGELQKGNELALPSKYVNFLYLASHYEKLKGSPEDNEQKQLFVEQHKHYLDEIIEQISEFSKRVILADANLDKVLSAYNKHRDKPIREQAENIIHLFTLTNLGAPAAFKYFDTTIDRKRYTSTKEVLDATLIHQSITGLYETRIDLSQLGGDGGGGGEAAAKGSSGGMDLLKPLTVERKGVKIKGYWNSQADITCVPKDLLQGEEPVRQQNVTTIHGTQEGDVYYVNLKIDGRRINTEVIGTTLDYAIITPGDVPWILKKPLELTIKLDLEEQQGTLLNNSILSKKGKEELKQLFEKYSALWQSWENQVGHRRIRPHKIATGTVKPTPQKQYHINPKAKPDIQIVINDLLKQGVLIQKESTMNTPVYPVPKPNGRWRMVLDYRAVNKVTPLIAVQNQHSYGILGSLFKGRYKTTIDLSNGFWAHPIVPEDYWITAFTWQGKQYCWTVLPQGFLNSPGLFNGDVVDLLQGIPNVEVYVDDVYISHDSEKEHLEYLDILFNRLKEAGYIISLKKSNIANSIVDFLGFQITNEGRGLTDTFKEKLENITAPTTLKQLQSILGKLNFARNFIPDFTELIAPLYALIPKSPKNYVPWQIEHSTTLETLITKLNGAEYLQGRKGDKTLIMKVNASYTTGYIRYYNEGEKKPISYVSIVFSKTELKFTELEKLLTTVHKGLLKALDLSMGQNIHVYSPIVSMQNIQKTPQTAKKALASRWLSWLSYLEDPRIRFFYDPQMPALKDLPAVDTGKDNKKHPSNFQHIFYTDGSAITSPTKEGHLNAGMGIVYFINKDGNLQKQQEWSISLGNHTAQFAEIAAFEFALKKCLPLGGNILVVTDSNYVAKAYNEELDVWASNGFVNNRKKPLKHISKWKSVADLKRLRPDVVVTHEPGHQKLDSSPHAYGNNLADQLATQASFKVHAGKRTADGSEFEKRTADGSEFESPKKKAKVE

SEQ ID NO: 7284 - protein, 2095 aa, synthetic construct
MPAAKRVKLDGGDKKYSIGLDIGTNSVGWAVITDEYKVPSKKFKVLGNTDRHSIKKNLIGALLFDSGETAEATRLKRTARRRYTRRKNRICYLQEIFSNEMAKVDDSFFHRLEESFLVEEDKKHERHPIFGNIVDEVAYHEKYPTIYHLRKKLVDSTDKADLRLIYLALAHMIKFRGHFLIEGDLNPDNSDVDKLFIQLVQTYNQLFEENPINASGVDAKAILSARLSKSRRLENLIAQLPGEKKNGLFGNLIALSLGLTPNFKSNFDLAEDAKLQLSKDTYDDDLDNLLAQIGDQYADLFLAAKNLSDAILLSDILRVNTEITKAPLSASMIKRYDEHHQDLTLLKALVRQQLPEKYKEIFFDQSKNGYAGYIDGGASQEEFYKFIKPILEKMDGTEELLVKLNREDLLRKQRTFDNGSIPHQIHLGELHAILRRQEDFYPFLKDNREKIEKILTFRIPYYVGPLARGNSRFAWMTRKSEETITPWNFEEVVDKGASAQSFIERMTNFDKNLPNEKVLPKHSLLYEYFTVYNELTKVKYVTEGMRKPAFLSGEQKKAIVDLLFKTNRKVTVKQLKEDYFKKIECFDSVEISGVEDRFNASLGTYHDLLKIIKDKDFLDNEENEDILEDIVLTLTLFEDREMIEERLKTYAHLFDDKVMKQLKRRRYTGWGRLSRKLINGIRDKQSGKTILDFLKSDGFANRNFMQLIHDDSLTFKEDIQKAQVSGQGDSLHEHIANLAGSPAIKKGILQTVKVVDELVKVMGRHKPENIVIEMARENQTTQKGQKNSRERMKRIEEGIKELGSQILKEHPVENTQLQNEKLYLYYLQNGRDMYVDQELDINRLSDYDVDHIVPQSFLKDDSIDNKVLTRSDKARGKSDNVPSEEVVKKMKNYWRQLLNAKLITQRKFDNLTKAERGGLSELDKAGFIKRQLVETRQITKHVAQILDSRMNTKYDENDKLIREVKVITLKSKLVSDFRKDFQFYKVREINNYHHAHDAYLNAVVGTALIKKYPKLESEFVYGDYKVYDVRKMIAKSEQEIGKATAKYFFYSNIMNFFKTEITLANGEIRKRPLIETNGETGEIVWDKGRDFATVRKVLSMPQVNIVKKTEVQTGGFSKESILPKRNSDKLIARKKDWDPKKYGGFDSPTVAYSVLVVAKVEKGKSKKLKSVKELLGITIMERSSFEKNPIDFLEAKGYKEVKKDLIIKLPKYSLFELENGRKRMLASAGELQKGNELALPSKYVNFLYLASHYEKLKGSPEDNEQKQLFVEQHKHYLDEIIEQISEFSKRVILADANLDKVLSAYNKHRDKPIREQAENIIHLFTLTNLGAPAAFKYFDTTIDRKRYTSTKEVLDATLIHQSITGLYETRIDLSQLGGDGGGGGEAAAKGSSGGTLQLEEEYRLFEPESTQKQEMDIWLKNFPQAWAETGGMGTAHCQAPVLIQLKATATPISIRQYPMPHEAYQGIKPHIRRMLDQGILKPCQSPWNTPLLPVKKPGTEDYRPVQDLREVNKRVEDIHPTVPNPYNLLSTLPPSHPWYTVLDLKDAFFCLRLHSESQLLFAFEWRDPEIGLSGQLTWTRLPQGFKNSPTLFNEALHSDLADFRVRYPALVLLQYVDDLLLAAATRTECLEGTKALLETLGNKGYRASAKKAQICLQEVTYLGYSLKDGQRWLTKARKEAILSIPVPKNSRQVREFLGKAGYCRLFIPGFAELAAPLYPLTRPGTLFQWGTEQQLAFEDIKKALLSSPALGLPDITKPFELFIDENSGFAKGVLVQKLGPWKRPVAYLSKKLDTVASGWPPCLRMVAAIAILVKDAGKLTLGQPLTILTSHPVEALVRQPPNKWLSNARMTHYQAMLLDAERVHFGPTVSLNPATLLPLPSGGNHHDCLQILAETHGTRPDLTDQPLPDADLTWYTDGSSFIRNGEREAGAAVTTESEVIWAAPLPPGTSAQRAELIALTQALKMAEGKKLTVYTDSRYAFATTHVHGEIYRRRGWLTSEGKEIKNKNEILALLEALFLPKRLSIIHCPGHQKGDSPQAKGNRLADDTAKKAATETHSSLTVLPAGKRTADGSEFEKRTADGSEFESPKKKAKVE

SEQ ID NO: 7285 - protein, 2176 aa, synthetic construct
MPAAKRVKLDGGDKKYSIGLDIGTNSVGWAVITDEYKVPSKKFKVLGNTDRHSIKKNLIGALLFDSGETAEATRLKRTARRRYTRRKNRICYLQEIFSNEMAKVDDSFFHRLEESFLVEEDKKHERHPIFGNIVDEVAYHEKYPTIYHLRKKLVDSTDKADLRLIYLALAHMIKFRGHFLIEGDLNPDNSDVDKLFIQLVQTYNQLFEENPINASGVDAKAILSARLSKSRRLENLIAQLPGEKKNGLFGNLIALSLGLTPNFKSNFDLAEDAKLQLSKDTYDDDLDNLLAQIGDQYADLFLAAKNLSDAILLSDILRVNTEITKAPLSASMIKRYDEHHQDLTLLKALVRQQLPEKYKEIFFDQSKNGYAGYIDGGASQEEFYKFIKPILEKMDGTEELLVKLNREDLLRKQRTFDNGSIPHQIHLGELHAILRRQEDFYPFLKDNREKIEKILTFRIPYYVGPLARGNSRFAWMTRKSEETITPWNFEEVVDKGASAQSFIERMTNFDKNLPNEKVLPKHSLLYEYFTVYNELTKVKYVTEGMRKPAFLSGEQKKAIVDLLFKTNRKVTVKQLKEDYFKKIECFDSVEISGVEDRFNASLGTYHDLLKIIKDKDFLDNEENEDILEDIVLTLTLFEDREMIEERLKTYAHLFDDKVMKQLKRRRYTGWGRLSRKLINGIRDKQSGKTILDFLKSDGFANRNFMQLIHDDSLTFKEDIQKAQVSGQGDSLHEHIANLAGSPAIKKGILQTVKVVDELVKVMGRHKPENIVIEMARENQTTQKGQKNSRERMKRIEEGIKELGSQILKEHPVENTQLQNEKLYLYYLQNGRDMYVDQELDINRLSDYDVDHIVPQSFLKDDSIDNKVLTRSDKARGKSDNVPSEEVVKKMKNYWRQLLNAKLITQRKFDNLTKAERGGLSELDKAGFIKRQLVETRQITKHVAQILDSRMNTKYDENDKLIREVKVITLKSKLVSDFRKDFQFYKVREINNYHHAHDAYLNAVVGTALIKKYPKLESEFVYGDYKVYDVRKMIAKSEQEIGKATAKYFFYSNIMNFFKTEITLANGEIRKRPLIETNGETGEIVWDKGRDFATVRKVLSMPQVNIVKKTEVQTGGFSKESILPKRNSDKLIARKKDWDPKKYGGFDSPTVAYSVLVVAKVEKGKSKKLKSVKELLGITIMERSSFEKNPIDFLEAKGYKEVKKDLIIKLPKYSLFELENGRKRMLASAGELQKGNELALPSKYVNFLYLASHYEKLKGSPEDNEQKQLFVEQHKHYLDEIIEQISEFSKRVILADANLDKVLSAYNKHRDKPIREQAENIIHLFTLTNLGAPAAFKYFDTTIDRKRYTSTKEVLDATLIHQSITGLYETRIDLSQLGGDGGGGGEAAAKGSSGGMNPLQLLQPLPAEIKGTKLLAHWNSGATITCIPESFLEDEQPIKKTLIKTIHGEKQQNVYYVTFKVKGRKVEAEVIASPYEYILLSPTDVPWLTQQPLQLTILVPLQEYQEKILSKTALPEDQKQQLKTLFVKYDNLWQHWENQVGHRKIRPHNIATGDYPPRPQKQYPINPKAKPSIQIVIDDLLKQGVLTPQNSTMNTPVYPVPKPDGRWRMVLDYREVNKTIPLTAAQNQHSAGILATIVRQKYKTTLDLANGFWAHPITPESYWLTAFTWQGKQYCWTRLPQGFLNSPALFTADVVDLLKEIPNVQVYVDDIYLSHDDPKEHVQQLEKVFQILLQAGYVVSLKKSEIGQKTVEFLGFNITKEGRGLTDTFKTKLLNITPPKDLKQLQSILGLLNFARNFIPNFAELVQPLYNLIASAKGKYIEWSEENTKQLNMVIEALNTASNLEERLPEQRLVIKVNTSPSAGYVRYYNETGKKPIMYLNYVFSKAELKFSMLEKLLTTMHKALIKAMDLAMGQEILVYSPIVSMTKIQKTPLPERKALPIRWITWMTYLEDPRIQFHYDKTLPELKHIPDVYTSSQSPVKHPSQYEGVFYTDGSAIKSPDPTKSNNAGMGIVHATYKPEYQVLNQWSIPLGNHTAQMAEIAAVEFACKKALKIPGPVLVITDSFYVAESANKELPYWKSNGFVNNKKKPLKHISKWKSIAECLSMKPDITIQHEKGISLQIPVFILKGNALADKLATQGSYVVNAGKRTADGSEFEKRTADGSEFESPKKKAKVE

SEQ ID NO: 7286 - protein, 2127 aa, synthetic construct
MPAAKRVKLDGGDKKYSIGLDIGTNSVGWAVITDEYKVPSKKFKVLGNTDRHSIKKNLIGALLFDSGETAEATRLKRTARRRYTRRKNRICYLQEIFSNEMAKVDDSFFHRLEESFLVEEDKKHERHPIFGNIVDEVAYHEKYPTIYHLRKKLVDSTDKADLRLIYLALAHMIKFRGHFLIEGDLNPDNSDVDKLFIQLVQTYNQLFEENPINASGVDAKAILSARLSKSRRLENLIAQLPGEKKNGLFGNLIALSLGLTPNFKSNFDLAEDAKLQLSKDTYDDDLDNLLAQIGDQYADLFLAAKNLSDAILLSDILRVNTEITKAPLSASMIKRYDEHHQDLTLLKALVRQQLPEKYKEIFFDQSKNGYAGYIDGGASQEEFYKFIKPILEKMDGTEELLVKLNREDLLRKQRTFDNGSIPHQIHLGELHAILRRQEDFYPFLKDNREKIEKILTFRIPYYVGPLARGNSRFAWMTRKSEETITPWNFEEVVDKGASAQSFIERMTNFDKNLPNEKVLPKHSLLYEYFTVYNELTKVKYVTEGMRKPAFLSGEQKKAIVDLLFKTNRKVTVKQLKEDYFKKIECFDSVEISGVEDRFNASLGTYHDLLKIIKDKDFLDNEENEDILEDIVLTLTLFEDREMIEERLKTYAHLFDDKVMKQLKRRRYTGWGRLSRKLINGIRDKQSGKTILDFLKSDGFANRNFMQLIHDDSLTFKEDIQKAQVSGQGDSLHEHIANLAGSPAIKKGILQTVKVVDELVKVMGRHKPENIVIEMARENQTTQKGQKNSRERMKRIEEGIKELGSQILKEHPVENTQLQNEKLYLYYLQNGRDMYVDQELDINRLSDYDVDHIVPQSFLKDDSIDNKVLTRSDKARGKSDNVPSEEVVKKMKNYWRQLLNAKLITQRKFDNLTKAERGGLSELDKAGFIKRQLVETRQITKHVAQILDSRMNTKYDENDKLIREVKVITLKSKLVSDFRKDFQFYKVREINNYHHAHDAYLNAVVGTALIKKYPKLESEFVYGDYKVYDVRKMIAKSEQEIGKATAKYFFYSNIMNFFKTEITLANGEIRKRPLIETNGETGEIVWDKGRDFATVRKVLSMPQVNIVKKTEVQTGGFSKESILPKRNSDKLIARKKDWDPKKYGGFDSPTVAYSVLVVAKVEKGKSKKLKSVKELLGITIMERSSFEKNPIDFLEAKGYKEVKKDLIIKLPKYSLFELENGRKRMLASAGELQKGNELALPSKYVNFLYLASHYEKLKGSPEDNEQKQLFVEQHKHYLDEIIEQISEFSKRVILADANLDKVLSAYNKHRDKPIREQAENIIHLFTLTNLGAPAAFKYFDTTIDRKRYTSTKEVLDATLIHQSITGLYETRIDLSQLGGDGGGGGEAAAKGSSGGLLGRDLLTKLKAQIQFSTEGPQVTWEDRPAMCLVLNLEEEYRLHEKPVPPSIDPSWLQLFPMVWAEKAGMGLANQVPPVVVELKSDASPVAVRQYPMSKEAREGIRPHIQRFLDLGILVPCQSPWNTPLLPVKKPGTNDYRPVQDLREVNKRVQDIHPTVPNPYNLLSSLPPSHTWYSVLDLKDAFFCLKLHPNSQPLFAFEWRDPEKGNTGQLTWTRLPQGFKNSPTLFNEALHRDLASFRALNPQVVMLQYVDDLLVAAPTYRDCKEGTRRLLQELSKLGYRVSAKKAQLCREEVTYLGYLLKGGKRWLTPARKATVMKIPTPTTPRQVREFLGTAGFCRLWIPGFASLAAPLYPLTRPKVPFTWTEAHQEAFGRIKEALLSAPALALPDLTKPFALYVDEKEGVARGVLTQTLGPWRRPVAYLSKKLDPVASGWPTCLKAIAAVALLLKDADKLTLGQNVLVIAPHNLESIVRQPPDRWMTNARMTHYQSLLLNERVSFAPPAILNPATLLPVESDDTPIHICSEILAEETGTRPDLRDQPLPGVPAWYTDGSSFIMDGRRQAGAAIVDNKRTVWASNLPEGTSAQKAELIALTQALRLAEGKSINIYTDSRYAFATAHVHGAIYKQRGWLTSAGKDIKNKEEILALLEAIHLPKRVAIIHCPGHQRGTDPVATGNRKADEAAKQAAQSTRILTETTKNAGKRTADGSEFEKRTADGSEFESPKKKAKVE

SEQ ID NO: 7287 - protein, 2218 aa, synthetic construct
MPAAKRVKLDGGDKKYSIGLDIGTNSVGWAVITDEYKVPSKKFKVLGNTDRHSIKKNLIGALLFDSGETAEATRLKRTARRRYTRRKNRICYLQEIFSNEMAKVDDSFFHRLEESFLVEEDKKHERHPIFGNIVDEVAYHEKYPTIYHLRKKLVDSTDKADLRLIYLALAHMIKFRGHFLIEGDLNPDNSDVDKLFIQLVQTYNQLFEENPINASGVDAKAILSARLSKSRRLENLIAQLPGEKKNGLFGNLIALSLGLTPNFKSNFDLAEDAKLQLSKDTYDDDLDNLLAQIGDQYADLFLAAKNLSDAILLSDILRVNTEITKAPLSASMIKRYDEHHQDLTLLKALVRQQLPEKYKEIFFDQSKNGYAGYIDGGASQEEFYKFIKPILEKMDGTEELLVKLNREDLLRKQRTFDNGSIPHQIHLGELHAILRRQEDFYPFLKDNREKIEKILTFRIPYYVGPLARGNSRFAWMTRKSEETITPWNFEEVVDKGASAQSFIERMTNFDKNLPNEKVLPKHSLLYEYFTVYNELTKVKYVTEGMRKPAFLSGEQKKAIVDLLFKTNRKVTVKQLKEDYFKKIECFDSVEISGVEDRFNASLGTYHDLLKIIKDKDFLDNEENEDILEDIVLTLTLFEDREMIEERLKTYAHLFDDKVMKQLKRRRYTGWGRLSRKLINGIRDKQSGKTILDFLKSDGFANRNFMQLIHDDSLTFKEDIQKAQVSGQGDSLHEHIANLAGSPAIKKGILQTVKVVDELVKVMGRHKPENIVIEMARENQTTQKGQKNSRERMKRIEEGIKELGSQILKEHPVENTQLQNEKLYLYYLQNGRDMYVDQELDINRLSDYDVDHIVPQSFLKDDSIDNKVLTRSDKARGKSDNVPSEEVVKKMKNYWRQLLNAKLITQRKFDNLTKAERGGLSELDKAGFIKRQLVETRQITKHVAQILDSRMNTKYDENDKLIREVKVITLKSKLVSDFRKDFQFYKVREINNYHHAHDAYLNAVVGTALIKKYPKLESEFVYGDYKVYDVRKMIAKSEQEIGKATAKYFFYSNIMNFFKTEITLANGEIRKRPLIETNGETGEIVWDKGRDFATVRKVLSMPQVNIVKKTEVQTGGFSKESILPKRNSDKLIARKKDWDPKKYGGFDSPTVAYSVLVVAKVEKGKSKKLKSVKELLGITIMERSSFEKNPIDFLEAKGYKEVKKDLIIKLPKYSLFELENGRKRMLASAGELQKGNELALPSKYVNFLYLASHYEKLKGSPEDNEQKQLFVEQHKHYLDEIIEQISEFSKRVILADANLDKVLSAYNKHRDKPIREQAENIIHLFTLTNLGAPAAFKYFDTTIDRKRYTSTKEVLDATLIHQSITGLYETRIDLSQLGGDGGGGGEAAAKGSSGGTLGDQGSRGSDPLPEPRVTLTVEGIPTEFLVNTGAEHSVLTKPMGKMGSKRTVVAGATGSKVYPWTTKRLLKIGQKQVTHSFLVIPECPAPLLGRDLLTKLKAQIQFSTEGPQVTWEDRPAMCLVLNLEEEYRLHEKPVPPSIDPSWLQLFPMVWAEKAGMGLANQVPPVVVELKSDASPVAVRQYPMSKEAREGIRPHIQRFLDLGILVPCQSPWNTPLLPVKKPGTNDYRPVQDLREVNKRVQDIHPTVPNPYNLLSSLPPSHTWYSVLDLKDAFFCLKLHPNSQPLFAFEWRDPEKGNTGQLTWTRLPQGFKNSPTLFNEALHRDLASFRALNPQVVMLQYVDDLLVAAPTYRDCKEGTRRLLQELSKLGYRVSAKKAQLCREEVTYLGYLLKGGKRWLTPARKATVMKIPTPTTPRQVREFLGTAGFCRLWIPGFASLAAPLYPLTRPKVPFTWTEAHQEAFGRIKEALLSAPALALPDLTKPFALYVDEKEGVARGVLTQTLGPWRRPVAYLSKKLDPVASGWPTCLKAIAAVALLLKDADKLTLGQNVLVIAPHNLESIVRQPPDRWMTNARMTHYQSLLLNERVSFAPPAILNPATLLPVESDDTPIHICSEILAEETGTRPDLRDQPLPGVPAWYTDGSSFIMDGRRQAGAAIVDNKRTVWASNLPEGTSAQKAELIALTQALRLAEGKSINIYTDSRYAFATAHVHGAIYKQRGWLTSAGKDIKNKEEILALLEAIHLPKRVAIIHCPGHQRGTDPVATGNRKADEAAKQAAQSTRILTETTKNAGKRTADGSEFEKRTADGSEFESPKKKAKVE

SEQ ID NO: 7288 - protein, 2096 aa, synthetic construct
MPAAKRVKLDGGDKKYSIGLDIGTNSVGWAVITDEYKVPSKKFKVLGNTDRHSIKKNLIGALLFDSGETAEATRLKRTARRRYTRRKNRICYLQEIFSNEMAKVDDSFFHRLEESFLVEEDKKHERHPIFGNIVDEVAYHEKYPTIYHLRKKLVDSTDKADLRLIYLALAHMIKFRGHFLIEGDLNPDNSDVDKLFIQLVQTYNQLFEENPINASGVDAKAILSARLSKSRRLENLIAQLPGEKKNGLFGNLIALSLGLTPNFKSNFDLAEDAKLQLSKDTYDDDLDNLLAQIGDQYADLFLAAKNLSDAILLSDILRVNTEITKAPLSASMIKRYDEHHQDLTLLKALVRQQLPEKYKEIFFDQSKNGYAGYIDGGASQEEFYKFIKPILEKMDGTEELLVKLNREDLLRKQRTFDNGSIPHQIHLGELHAILRRQEDFYPFLKDNREKIEKILTFRIPYYVGPLARGNSRFAWMTRKSEETITPWNFEEVVDKGASAQSFIERMTNFDKNLPNEKVLPKHSLLYEYFTVYNELTKVKYVTEGMRKPAFLSGEQKKAIVDLLFKTNRKVTVKQLKEDYFKKIECFDSVEISGVEDRFNASLGTYHDLLKIIKDKDFLDNEENEDILEDIVLTLTLFEDREMIEERLKTYAHLFDDKVMKQLKRRRYTGWGRLSRKLINGIRDKQSGKTILDFLKSDGFANRNFMQLIHDDSLTFKEDIQKAQVSGQGDSLHEHIANLAGSPAIKKGILQTVKVVDELVKVMGRHKPENIVIEMARENQTTQKGQKNSRERMKRIEEGIKELGSQILKEHPVENTQLQNEKLYLYYLQNGRDMYVDQELDINRLSDYDVDHIVPQSFLKDDSIDNKVLTRSDKARGKSDNVPSEEVVKKMKNYWRQLLNAKLITQRKFDNLTKAERGGLSELDKAGFIKRQLVETRQITKHVAQILDSRMNTKYDENDKLIREVKVITLKSKLVSDFRKDFQFYKVREINNYHHAHDAYLNAVVGTALIKKYPKLESEFVYGDYKVYDVRKMIAKSEQEIGKATAKYFFYSNIMNFFKTEITLANGEIRKRPLIETNGETGEIVWDKGRDFATVRKVLSMPQVNIVKKTEVQTGGFSKESILPKRNSDKLIARKKDWDPKKYGGFDSPTVAYSVLVVAKVEKGKSKKLKSVKELLGITIMERSSFEKNPIDFLEAKGYKEVKKDLIIKLPKYSLFELENGRKRMLASAGELQKGNELALPSKYVNFLYLASHYEKLKGSPEDNEQKQLFVEQHKHYLDEIIEQISEFSKRVILADANLDKVLSAYNKHRDKPIREQAENIIHLFTLTNLGAPAAFKYFDTTIDRKRYTSTKEVLDATLIHQSITGLYETRIDLSQLGGDGGGGGEAAAKGSSGGTLNLEDEYRLYETSAEPEVSPGSTWLSDFPQAWAETGGMGLAVRQAPLIIPLKATSTPVSIKQYPMSQEAKLGIKPHIQRLLDQGILVPCQSPWNTPLLPVKKPGTNDYRPVQDLREVNKRVEDIHPTVPNPYNLLSGLPPSHRWYTVLDLKDAFFCLRLHPTSQPLFAFEWRDPGMGISGQLTWTRLPQGFKNSPTLFNEALHRDLADFRIQHPDLILLQYVDDILLAATSELDCQQGTRALLLTLGNLGYRASAKKAQLCQKQVKYLGYLLKEGQRWLTEARKETVMGQPTPKTPRQLREFLGTAGFCRLWIPGFAEMAAPLYPLTKPGTLFNWGPDQQKAYQEIKQALLTAPALGLPDLTKPFELFVDEKQGYAKGVLTQKLGPWRRPVAYLSKKLDPVAAGWPPCLRMVAAIAVLRKDAGKLTMGQPLVILAPHAVEALVKQPPDRWLSNARMTHYQAMLLDTDRVQFGPVVALNPATLLPLPEEGAPHDCLEILAETHGTRPDLTDQPIPDADHTWYTDGSSFLQEGQRKAGAAVTTETEVIWARALPAGTSAQRAELIALTQALKMAEGKRLNVYTDSRYAFATAHIHGEIYRRRGWLTSEGREIKNKSEILALLKALFLPKRLSIIHCLGHQKGDSAEARGNRLADQAAREAAIKTPPDTSTLLAGKRTADGSEFEKRTADGSEFESPKKKAKVE

SEQ ID NO: 7289 - protein, 2096 aa, synthetic construct
MPAAKRVKLDGGDKKYSIGLDIGTNSVGWAVITDEYKVPSKKFKVLGNTDRHSIKKNLIGALLFDSGETAEATRLKRTARRRYTRRKNRICYLQEIFSNEMAKVDDSFFHRLEESFLVEEDKKHERHPIFGNIVDEVAYHEKYPTIYHLRKKLVDSTDKADLRLIYLALAHMIKFRGHFLIEGDLNPDNSDVDKLFIQLVQTYNQLFEENPINASGVDAKAILSARLSKSRRLENLIAQLPGEKKNGLFGNLIALSLGLTPNFKSNFDLAEDAKLQLSKDTYDDDLDNLLAQIGDQYADLFLAAKNLSDAILLSDILRVNTEITKAPLSASMIKRYDEHHQDLTLLKALVRQQLPEKYKEIFFDQSKNGYAGYIDGGASQEEFYKFIKPILEKMDGTEELLVKLNREDLLRKQRTFDNGSIPHQIHLGELHAILRRQEDFYPFLKDNREKIEKILTFRIPYYVGPLARGNSRFAWMTRKSEETITPWNFEEVVDKGASAQSFIERMTNFDKNLPNEKVLPKHSLLYEYFTVYNELTKVKYVTEGMRKPAFLSGEQKKAIVDLLFKTNRKVTVKQLKEDYFKKIECFDSVEISGVEDRFNASLGTYHDLLKIIKDKDFLDNEENEDILEDIVLTLTLFEDREMIEERLKTYAHLFDDKVMKQLKRRRYTGWGRLSRKLINGIRDKQSGKTILDFLKSDGFANRNFMQLIHDDSLTFKEDIQKAQVSGQGDSLHEHIANLAGSPAIKKGILQTVKVVDELVKVMGRHKPENIVIEMARENQTTQKGQKNSRERMKRIEEGIKELGSQILKEHPVENTQLQNEKLYLYYLQNGRDMYVDQELDINRLSDYDVDHIVPQSFLKDDSIDNKVLTRSDKARGKSDNVPSEEVVKKMKNYWRQLLNAKLITQRKFDNLTKAERGGLSELDKAGFIKRQLVETRQITKHVAQILDSRMNTKYDENDKLIREVKVITLKSKLVSDFRKDFQFYKVREINNYHHAHDAYLNAVVGTALIKKYPKLESEFVYGDYKVYDVRKMIAKSEQEIGKATAKYFFYSNIMNFFKTEITLANGEIRKRPLIETNGETGEIVWDKGRDFATVRKVLSMPQVNIVKKTEVQTGGFSKESILPKRNSDKLIARKKDWDPKKYGGFDSPTVAYSVLVVAKVEKGKSKKLKSVKELLGITIMERSSFEKNPIDFLEAKGYKEVKKDLIIKLPKYSLFELENGRKRMLASAGELQKGNELALPSKYVNFLYLASHYEKLKGSPEDNEQKQLFVEQHKHYLDEIIEQISEFSKRVILADANLDKVLSAYNKHRDKPIREQAENIIHLFTLTNLGAPAAFKYFDTTIDRKRYTSTKEVLDATLIHQSITGLYETRIDLSQLGGDGGGGGEAAAKGSSGGTLGIEDEYRLHETSTEPDVSLGSTWLSDFPQAWAETGGMGLAVRQAPLIIPLKATSTPVSIQQYPMSHEARLGIKPHIQRLLDQGILVPCQSPWNTPLLPVKKPGTNDYRPVQDLREVNKRVEDIHPTVPNPYNLLSGLPPSHQWYTVLDLKDAFFCLRLHPTSQPLFAFEWRDPGMGISGQLTWTRLPQGFKNSPTLFDEALHRDLADFRIQHPDLILLQYVDDILLAATSELDCQQGTRALLQTLGDLGYRASAKKAQICQKQVKYLGYLLREGQRWLTEARKETVMGQPVPKTPRQLREFLGTAGFCRLWIPGFAEMAAPLYPLTKTGTLFSWGPDQQKAYQEIKQALLTAPALGLPDLTKPFELFVDEKQGYAKGVLTQKLGPWRRPVAYLSKKLDPVAAGWPPCLRMVAAIAVLTKDAGKLTMGQPLVILAPHAVEALVKQPPDRWLSNARMTHYQAMLLDTDRVQFGPVVALNPATLLPLPEEGAPHDCLEILAETHGTRPDLTDQPIPDADHTWYTDGSSFLQEGQRKAGAAVTTETEVIWAGALPAGTSAQRAELIALTQALKMAEGKRLNVYTDSRYAFATAHIHGEIYRRRGLLTSEGREIKNKSEILALLKALFLPKRLSIIHCLGHQKGDSAEARGNRLADQAAREAAIKTPPDTSTLLAGKRTADGSEFEKRTADGSEFESPKKKAKVE

SEQ ID NO: 7290 - protein, 2096 aa, synthetic construct
MPAAKRVKLDGGDKKYSIGLDIGTNSVGWAVITDEYKVPSKKFKVLGNTDRHSIKKNLIGALLFDSGETAEATRLKRTARRRYTRRKNRICYLQEIFSNEMAKVDDSFFHRLEESFLVEEDKKHERHPIFGNIVDEVAYHEKYPTIYHLRKKLVDSTDKADLRLIYLALAHMIKFRGHFLIEGDLNPDNSDVDKLFIQLVQTYNQLFEENPINASGVDAKAILSARLSKSRRLENLIAQLPGEKKNGLFGNLIALSLGLTPNFKSNFDLAEDAKLQLSKDTYDDDLDNLLAQIGDQYADLFLAAKNLSDAILLSDILRVNTEITKAPLSASMIKRYDEHHQDLTLLKALVRQQLPEKYKEIFFDQSKNGYAGYIDGGASQEEFYKFIKPILEKMDGTEELLVKLNREDLLRKQRTFDNGSIPHQIHLGELHAILRRQEDFYPFLKDNREKIEKILTFRIPYYVGPLARGNSRFAWMTRKSEETITPWNFEEVVDKGASAQSFIERMTNFDKNLPNEKVLPKHSLLYEYFTVYNELTKVKYVTEGMRKPAFLSGEQKKAIVDLLFKTNRKVTVKQLKEDYFKKIECFDSVEISGVEDRFNASLGTYHDLLKIIKDKDFLDNEENEDILEDIVLTLTLFEDREMIEERLKTYAHLFDDKVMKQLKRRRYTGWGRLSRKLINGIRDKQSGKTILDFLKSDGFANRNFMQLIHDDSLTFKEDIQKAQVSGQGDSLHEHIANLAGSPAIKKGILQTVKVVDELVKVMGRHKPENIVIEMARENQTTQKGQKNSRERMKRIEEGIKELGSQILKEHPVENTQLQNEKLYLYYLQNGRDMYVDQELDINRLSDYDVDHIVPQSFLKDDSIDNKVLTRSDKARGKSDNVPSEEVVKKMKNYWRQLLNAKLITQRKFDNLTKAERGGLSELDKAGFIKRQLVETRQITKHVAQILDSRMNTKYDENDKLIREVKVITLKSKLVSDFRKDFQFYKVREINNYHHAHDAYLNAVVGTALIKKYPKLESEFVYGDYKVYDVRKMIAKSEQEIGKATAKYFFYSNIMNFFKTEITLANGEIRKRPLIETNGETGEIVWDKGRDFATVRKVLSMPQVNIVKKTEVQTGGFSKESILPKRNSDKLIARKKDWDPKKYGGFDSPTVAYSVLVVAKVEKGKSKKLKSVKELLGITIMERSSFEKNPIDFLEAKGYKEVKKDLIIKLPKYSLFELENGRKRMLASAGELQKGNELALPSKYVNFLYLASHYEKLKGSPEDNEQKQLFVEQHKHYLDEIIEQISEFSKRVILADANLDKVLSAYNKHRDKPIREQAENIIHLFTLTNLGAPAAFKYFDTTIDRKRYTSTKEVLDATLIHQSITGLYETRIDLSQLGGDGGGGGEAAAKGSSGGTLGIEDEYRLHETSTEPDVSLGSTWLSDFPQAWAETGGMGLAVRQAPLIIPLKATSTPVSIQQYPMSHEARLGIKPHIQRLLDQGILVPCQSPWNTPLLPVKKPGTNDYRPVQDLREVNKRVEDIHPTVPNPYNLLSGLPPSHQWYTVLDLKDAFFCLRLHPTSQPLFAFEWRDPGMGISGQLTWTRLPQGFKNSPTLFNEALHRDLADFRIQHPDLILLQYVDDILLAATSELDCQQGTRALLQTLGDLGYRASAKKAQICQKQVKYLGYLLREGQRWLTEARKETVMGQPVPKTPRQLREFLGTAGFCRLWIPGFAEMAAPLYPLTKPGTLFSWGPDQQKAYQEIKQALLTAPALGLPDLTKPFELFVDEKQGYAKGVLTQKLGPWRRPVAYLSKKLDPVAAGWPPCLRMVAAIAVLTKDAGKLTMGQPLVILAPHAVEALVKQPPDRWLSNARMTHYQAMLLDTDRVQFGPVVALNPATLLPLPEEGAPHDCLEILAETHGTRPDLTDQPIPDADHTWYTDGSSFLQEGQRKAGAAVTTETEVIWAGALPAGTSAQRAELIALTQALKMAEGKRLNVYTDSRYAFATAHIHGEIYRRRGWLTSEGREIKNKSEILALLKALFLPKRLSIIHCLGHQKGDSAEARGNRLADQAAREAAIKTPPDTSTLLAGKRTADGSEFEKRTADGSEFESPKKKAKVE

SEQ ID NO: 7291 - protein, 2096 aa, synthetic construct
MPAAKRVKLDGGDKKYSIGLDIGTNSVGWAVITDEYKVPSKKFKVLGNTDRHSIKKNLIGALLFDSGETAEATRLKRTARRRYTRRKNRICYLQEIFSNEMAKVDDSFFHRLEESFLVEEDKKHERHPIFGNIVDEVAYHEKYPTIYHLRKKLVDSTDKADLRLIYLALAHMIKFRGHFLIEGDLNPDNSDVDKLFIQLVQTYNQLFEENPINASGVDAKAILSARLSKSRRLENLIAQLPGEKKNGLFGNLIALSLGLTPNFKSNFDLAEDAKLQLSKDTYDDDLDNLLAQIGDQYADLFLAAKNLSDAILLSDILRVNTEITKAPLSASMIKRYDEHHQDLTLLKALVRQQLPEKYKEIFFDQSKNGYAGYIDGGASQEEFYKFIKPILEKMDGTEELLVKLNREDLLRKQRTFDNGSIPHQIHLGELHAILRRQEDFYPFLKDNREKIEKILTFRIPYYVGPLARGNSRFAWMTRKSEETITPWNFEEVVDKGASAQSFIERMTNFDKNLPNEKVLPKHSLLYEYFTVYNELTKVKYVTEGMRKPAFLSGEQKKAIVDLLFKTNRKVTVKQLKEDYFKKIECFDSVEISGVEDRFNASLGTYHDLLKIIKDKDFLDNEENEDILEDIVLTLTLFEDREMIEERLKTYAHLFDDKVMKQLKRRRYTGWGRLSRKLINGIRDKQSGKTILDFLKSDGFANRNFMQLIHDDSLTFKEDIQKAQVSGQGDSLHEHIANLAGSPAIKKGILQTVKVVDELVKVMGRHKPENIVIEMARENQTTQKGQKNSRERMKRIEEGIKELGSQILKEHPVENTQLQNEKLYLYYLQNGRDMYVDQELDINRLSDYDVDHIVPQSFLKDDSIDNKVLTRSDKARGKSDNVPSEEVVKKMKNYWRQLLNAKLITQRKFDNLTKAERGGLSELDKAGFIKRQLVETRQITKHVAQILDSRMNTKYDENDKLIREVKVITLKSKLVSDFRKDFQFYKVREINNYHHAHDAYLNAVVGTALIKKYPKLESEFVYGDYKVYDVRKMIAKSEQEIGKATAKYFFYSNIMNFFKTEITLANGEIRKRPLIETNGETGEIVWDKGRDFATVRKVLSMPQVNIVKKTEVQTGGFSKESILPKRNSDKLIARKKDWDPKKYGGFDSPTVAYSVLVVAKVEKGKSKKLKSVKELLGITIMERSSFEKNPIDFLEAKGYKEVKKDLIIKLPKYSLFELENGRKRMLASAGELQKGNELALPSKYVNFLYLASHYEKLKGSPEDNEQKQLFVEQHKHYLDEIIEQISEFSKRVILADANLDKVLSAYNKHRDKPIREQAENIIHLFTLTNLGAPAAFKYFDTTIDRKRYTSTKEVLDATLIHQSITGLYETRIDLSQLGGDGGGGGEAAAKGSSGGTLNIEDEYRLHETSKEPDVSLGSTWLSDFPQAWAETGGMGLAVRQAPLIIPLKATSTPVSIKQYPMSQEARLGIKPHIQRLLDQGILVPCQSPWNTPLLPVKKPGTNDYRPVQDLREVNKRVEDIHPTVPNPYNLLSGLPPSHQWYTVLDLKDAFFCLRLHPTSQPLFAFEWRDPEMGISGQLTWTRLPQGFKNSPTLFNEALHRDLAGFRIQHPDLILLQYVDDLLLAATSELDCQQGTRALLQTLGDLGYRASAKKAQICQKQVKYLGYLLKEGQRWLTEARKETVMGQPIPKTPRQLREFLGTAGFCRLWIPGFAEMAAPLYPLTKPGTLFNWGPDQQKAFQEIKQALLTAPALGLPDLTKPFELFVDEKQGYAKGVLTQKLGPWRRPVAYLSKKLDPVAAGWPPCLRMVAAIAVLTKDAGKLTMGQPLVILAPHAVEALVKQPPDRWLSNARMTHYQALLLDTDRVQFGPVVALNPATLLPLPEEGLQHDCLDILAEAHGTRSDLMDQPLPDADHTWYTDGSSFLQEGQRKAGAAVTTETEVIWARALPAGTSAQRAELIALTQALKMAEGKKLNVYTDSRYAFATAHIHGEIYRRRGWLTSEGKEIKNKDEILALLKALFLPKRLSIIHCPGHQKGNSAEARGNRMADQAAREVATRETPETSTLLAGKRTADGSEFEKRTADGSEFESPKKKAKVE

SEQ ID NO: 7292 - protein, 2096 aa, synthetic construct
MPAAKRVKLDGGDKKYSIGLDIGTNSVGWAVITDEYKVPSKKFKVLGNTDRHSIKKNLIGALLFDSGETAEATRLKRTARRRYTRRKNRICYLQEIFSNEMAKVDDSFFHRLEESFLVEEDKKHERHPIFGNIVDEVAYHEKYPTIYHLRKKLVDSTDKADLRLIYLALAHMIKFRGHFLIEGDLNPDNSDVDKLFIQLVQTYNQLFEENPINASGVDAKAILSARLSKSRRLENLIAQLPGEKKNGLFGNLIALSLGLTPNFKSNFDLAEDAKLQLSKDTYDDDLDNLLAQIGDQYADLFLAAKNLSDAILLSDILRVNTEITKAPLSASMIKRYDEHHQDLTLLKALVRQQLPEKYKEIFFDQSKNGYAGYIDGGASQEEFYKFIKPILEKMDGTEELLVKLNREDLLRKQRTFDNGSIPHQIHLGELHAILRRQEDFYPFLKDNREKIEKILTFRIPYYVGPLARGNSRFAWMTRKSEETITPWNFEEVVDKGASAQSFIERMTNFDKNLPNEKVLPKHSLLYEYFTVYNELTKVKYVTEGMRKPAFLSGEQKKAIVDLLFKTNRKVTVKQLKEDYFKKIECFDSVEISGVEDRFNASLGTYHDLLKIIKDKDFLDNEENEDILEDIVLTLTLFEDREMIEERLKTYAHLFDDKVMKQLKRRRYTGWGRLSRKLINGIRDKQSGKTILDFLKSDGFANRNFMQLIHDDSLTFKEDIQKAQVSGQGDSLHEHIANLAGSPAIKKGILQTVKVVDELVKVMGRHKPENIVIEMARENQTTQKGQKNSRERMKRIEEGIKELGSQILKEHPVENTQLQNEKLYLYYLQNGRDMYVDQELDINRLSDYDVDHIVPQSFLKDDSIDNKVLTRSDKARGKSDNVPSEEVVKKMKNYWRQLLNAKLITQRKFDNLTKAERGGLSELDKAGFIKRQLVETRQITKHVAQILDSRMNTKYDENDKLIREVKVITLKSKLVSDFRKDFQFYKVREINNYHHAHDAYLNAVVGTALIKKYPKLESEFVYGDYKVYDVRKMIAKSEQEIGKATAKYFFYSNIMNFFKTEITLANGEIRKRPLIETNGETGEIVWDKGRDFATVRKVLSMPQVNIVKKTEVQTGGFSKESILPKRNSDKLIARKKDWDPKKYGGFDSPTVAYSVLVVAKVEKGKSKKLKSVKELLGITIMERSSFEKNPIDFLEAKGYKEVKKDLIIKLPKYSLFELENGRKRMLASAGELQKGNELALPSKYVNFLYLASHYEKLKGSPEDNEQKQLFVEQHKHYLDEIIEQISEFSKRVILADANLDKVLSAYNKHRDKPIREQAENIIHLFTLTNLGAPAAFKYFDTTIDRKRYTSTKEVLDATLIHQSITGLYETRIDLSQLGGDGGGGGEAAAKGSSGGTLNIEDEYRLHETSKGPDVPLGSTWLSDFPQAWAETGGMGLAVRQAPLIIPLKATSTPVSIKQYPMSQEARLGIKPHIQRLLDQGILVPCQSPWNTPLLPVKKPGTNDYRPVQDLREVNKRVEDIHPTVPNPYNLLSGLPPSHQWYTVLDLKDAFFCLRLHPTSQSLFAFEWRDPEMGISGQLTWTRLPQGFKNSPTLFNEALHRDLADFRIQHPDLILLQYVDDLLLAATSELDCQQGTRALLQTLGDLGYRASAKKAQICQKQVKYLGYLLKEGQRWLTEARKETVMGQPTPKTPRQLREFLGTAGFCRLWIPGFAEMAAPLYPLTKPGTLFEWGPDQQKAYQEIKQALLTAPALGLPDLTKPFELFVDEKQGYAKGVLTQKLGPWRRPVAYLSKKLDPVAAGWPPCLRMVAAIAVLTKDAGKLTMGQPLVILAPHAVEALVKQPPDRWLSNARMTHYQALLLDTDRVQFGPIVALNPATLLPLPEEGLQHDCLDILAEAHGTRPDLTDQPLPDADHTWYTDGSSFLQEGQRKAGAAVTTETEVVWAKALPAGTSAQRAELIALTQALKMAEGKKLNVYTDSRYAFATAHIHGEIYRRRGWLTSEGKEIKNKDEILALLKALFLPKRLSIIHCPGHQKGNRAEARGNRMADQAAREVATRETPETSTLLAGKRTADGSEFEKRTADGSEFESPKKKAKVE

SEQ ID NO: 7293 - protein, 2096 aa, synthetic construct; identical to SEQ ID NO: 4530

SEQ ID NO: 7294 - protein, 2096 aa, synthetic construct
MPAAKRVKLDGGDKKYSIGLDIGTNSVGWAVITDEYKVPSKKFKVLGNTDRHSIKKNLIGALLFDSGETAEATRLKRTARRRYTRRKNRICYLQEIFSNEMAKVDDSFFHRLEESFLVEEDKKHERHPIFGNIVDEVAYHEKYPTIYHLRKKLVDSTDKADLRLIYLALAHMIKFRGHFLIEGDLNPDNSDVDKLFIQLVQTYNQLFEENPINASGVDAKAILSARLSKSRRLENLIAQLPGEKKNGLFGNLIALSLGLTPNFKSNFDLAEDAKLQLSKDTYDDDLDNLLAQIGDQYADLFLAAKNLSDAILLSDILRVNTEITKAPLSASMIKRYDEHHQDLTLLKALVRQQLPEKYKEIFFDQSKNGYAGYIDGGASQEEFYKFIKPILEKMDGTEELLVKLNREDLLRKQRTFDNGSIPHQIHLGELHAILRRQEDFYPFLKDNREKIEKILTFRIPYYVGPLARGNSRFAWMTRKSEETITPWNFEEVVDKGASAQSFIERMTNFDKNLPNEKVLPKHSLLYEYFTVYNELTKVKYVTEGMRKPAFLSGEQKKAIVDLLFKTNRKVTVKQLKEDYFKKIECFDSVEISGVEDRFNASLGTYHDLLKIIKDKDFLDNEENEDILEDIVLTLTLFEDREMIEERLKTYAHLFDDKVMKQLKRRRYTGWGRLSRKLINGIRDKQSGKTILDFLKSDGFANRNFMQLIHDDSLTFKEDIQKAQVSGQGDSLHEHIANLAGSPAIKKGILQTVKVVDELVKVMGRHKPENIVIEMARENQTTQKGQKNSRERMKRIEEGIKELGSQILKEHPVENTQLQNEKLYLYYLQNGRDMYVDQELDINRLSDYDVDHIVPQSFLKDDSIDNKVLTRSDKARGKSDNVPSEEVVKKMKNYWRQLLNAKLITQRKFDNLTKAERGGLSELDKAGFIKRQLVETRQITKHVAQILDSRMNTKYDENDKLIREVKVITLKSKLVSDFRKDFQFYKVREINNYHHAHDAYLNAVVGTALIKKYPKLESEFVYGDYKVYDVRKMIAKSEQEIGKATAKYFFYSNIMNFFKTEITLANGEIRKRPLIETNGETGEIVWDKGRDFATVRKVLSMPQVNIVKKTEVQTGGFSKESILPKRNSDKLIARKKDWDPKKYGGFDSPTVAYSVLVVAKVEKGKSKKLKSVKELLGITIMERSSFEKNPIDFLEAKGYKEVKKDLIIKLPKYSLFELENGRKRMLASAGELQKGNELALPSKYVNFLYLASHYEKLKGSPEDNEQKQLFVEQHKHYLDEIIEQISEFSKRVILADANLDKVLSAYNKHRDKPIREQAENIIHLFTLTNLGAPAAFKYFDTTIDRKRYTSTKEVLDATLIHQSITGLYETRIDLSQLGGDGGGGGEAAAKGSSGGTLNIEDEHRLHETSKEPDVSLGSTWLSDFPQAWAETGGMGLAVRQAPLIIPLKATSTPVSIKQYPMSQEARLGIKPHIQRLLDQGILVPCQSPWNTPLLPVKKPGTNDYRPVQDLREVNKRVEDIHPTVPNPYNLLSGLPPSHQWYTVLDLKDAFFCLRLHPTSQPLFAFEWRDPEMGISGQLTWTRLPQGFKNSPTLFDEALHRDLADFRIQHPDLILLQYVDDLLLAATSELDCQQGTRALLQTLGNLGYRASAKKAQICQKQVKYLGYLLKEGQRWLTEARKETVMGQPTPKTPRQLREFLGTAGFCRLWIPGFAEMAAPLYPLTKTGTLFNWGPDQQKAYQEIKQALLTAPALGLPDLTKPFELFVDEKQGYAKGVLTQKLGPWRRPVAYLSKKLDPVAAGWPPCLRMVAAIAVLTKDAGKLTMGQPLVILAPHAVEALVKQPPDRWLSNARMTHYQALLLDTDRVQFGPVVALNPATLLPLPEEGLQHNCLDILAEAHGTRPDLTDQPLPDADHTWYTDGSSLLQEGQRKAGAAVTTETEVIWAKALPAGTSAQRAELIALTQALKMAEGKKLNVYTDSRYAFATAHIHGEIYRRRGLLTSEGKEIKNKDEILALLKALFLPKRLSIIHCPGHQKGHSAEARGNRMADQAARKAAITETPDTSTLLAGKRTADGSEFEKRTADGSEFESPKKKAKVE

SEQ ID NO: 7295 - protein, 2096 aa, synthetic construct; identical to SEQ ID NO: 4530

SEQ ID NO: 7296 - protein, 2090 aa, synthetic construct
MPAAKRVKLDGGDKKYSIGLDIGTNSVGWAVITDEYKVPSKKFKVLGNTDRHSIKKNLIGALLFDSGETAEATRLKRTARRRYTRRKNRICYLQEIFSNEMAKVDDSFFHRLEESFLVEEDKKHERHPIFGNIVDEVAYHEKYPTIYHLRKKLVDSTDKADLRLIYLALAHMIKFRGHFLIEGDLNPDNSDVDKLFIQLVQTYNQLFEENPINASGVDAKAILSARLSKSRRLENLIAQLPGEKKNGLFGNLIALSLGLTPNFKSNFDLAEDAKLQLSKDTYDDDLDNLLAQIGDQYADLFLAAKNLSDAILLSDILRVNTEITKAPLSASMIKRYDEHHQDLTLLKALVRQQLPEKYKEIFFDQSKNGYAGYIDGGASQEEFYKFIKPILEKMDGTEELLVKLNREDLLRKQRTFDNGSIPHQIHLGELHAILRRQEDFYPFLKDNREKIEKILTFRIPYYVGPLARGNSRFAWMTRKSEETITPWNFEEVVDKGASAQSFIERMTNFDKNLPNEKVLPKHSLLYEYFTVYNELTKVKYVTEGMRKPAFLSGEQKKAIVDLLFKTNRKVTVKQLKEDYFKKIECFDSVEISGVEDRFNASLGTYHDLLKIIKDKDFLDNEENEDILEDIVLTLTLFEDREMIEERLKTYAHLFDDKVMKQLKRRRYTGWGRLSRKLINGIRDKQSGKTILDFLKSDGFANRNFMQLIHDDSLTFKEDIQKAQVSGQGDSLHEHIANLAGSPAIKKGILQTVKVVDELVKVMGRHKPENIVIEMARENQTTQKGQKNSRERMKRIEEGIKELGSQILKEHPVENTQLQNEKLYLYYLQNGRDMYVDQELDINRLSDYDVDHIVPQSFLKDDSIDNKVLTRSDKARGKSDNVPSEEVVKKMKNYWRQLLNAKLITQRKFDNLTKAERGGLSELDKAGFIKRQLVETRQITKHVAQILDSRMNTKYDENDKLIREVKVITLKSKLVSDFRKDFQFYKVREINNYHHAHDAYLNAVVGTALIKKYPKLESEFVYGDYKVYDVRKMIAKSEQEIGKATAKYFFYSNIMNFFKTEITLANGEIRKRPLIETNGETGEIVWDKGRDFATVRKVLSMPQVNIVKKTEVQTGGFSKESILPKRNSDKLIARKKDWDPKKYGGFDSPTVAYSVLVVAKVEKGKSKKLKSVKELLGITIMERSSFEKNPIDFLEAKGYKEVKKDLIIKLPKYSLFELENGRKRMLASAGELQKGNELALPSKYVNFLYLASHYEKLKGSPEDNEQKQLFVEQHKHYLDEIIEQISEFSKRVILADANLDKVLSAYNKHRDKPIREQAENIIHLFTLTNLGAPAAFKYFDTTIDRKRYTSTKEVLDATLIHQSITGLYETRIDLSQLGGDGGGGGEAAAKGSSGGTLQLDDEYRLYSPLVKPDQNIQFWLEQFPQAWAETAGMGLAKQVPPQVIQLKASATPVSVRQYPLSKEAQEGIRPHVQRLIQQGILVPVQSPWNTPLLPVRKPGTNDYRPVQDLREVNKRVQDIHPTVPNPYNLLCALPPQRSWYTVLDLKDAFFCLRLHPTSQPLFAFEWRDPGTGRTGQLTWTRLPQGFKNSPTIFDEALHRDLANFRIQHPQVTLLQYVDDLLLAGATKQDCLEGTKALLLELSDLGYRASAKKAQICRREVTYLGYSLRDGQRWLTEARKKTVVQIPAPTTAKQVREFLGTAGFCRLWIPGFATLAAPLYPLTKEKGEFSWAPEHQKAFDAIKKALLSAPALALPDVTKPFTLYVDERKGVARGVLTQTLGPWRRPVAYLSKKLDPVASGWPVCLKAIAAVAILVKDADKLTLGQNITVIAPHALENIVRQPPDRWMTNARMTHYQSLLLTERVTFAPPAALNPATLLPEETDEPVTHDCHQLLIEETGVRKDLTDIPLTGEVLTWFTDGSSYVVEGKRMAGAAVVDGTRTIWASSLPEGTSAQKAELMALTQALRLAEGKSINIYTDSRYAFATAHVHGAIYKQRGLLTSAGREIKNKEEILSLLEALHLPKRLAIIHCPGHQKAKDPISRGNQMADRVAKQAAQGVNLLAGKRTADGSEFEKRTADGSEFESPKKKAKVE

SEQ ID NO: 7297 - protein, 2176 aa, synthetic construct
MPAAKRVKLDGGDKKYSIGLDIGTNSVGWAVITDEYKVPSKKFKVLGNTDRHSIKKNLIGALLFDSGETAEATRLKRTARRRYTRRKNRICYLQEIFSNEMAKVDDSFFHRLEESFLVEEDKKHERHPIFGNIVDEVAYHEKYPTIYHLRKKLVDSTDKADLRLIYLALAHMIKFRGHFLIEGDLNPDNSDVDKLFIQLVQTYNQLFEENPINASGVDAKAILSARLSKSRRLENLIAQLPGEKKNGLFGNLIALSLGLTPNFKSNFDLAEDAKLQLSKDTYDDDLDNLLAQIGDQYADLFLAAKNLSDAILLSDILRVNTEITKAPLSASMIKRYDEHHQDLTLLKALVRQQLPEKYKEIFFDQSKNGYAGYIDGGASQEEFYKFIKPILEKMDGTEELLVKLNREDLLRKQRTFDNGSIPHQIHLGELHAILRRQEDFYPFLKDNREKIEKILTFRIPYYVGPLARGNSRFAWMTRKSEETITPWNFEEVVDKGASAQSFIERMTNFDKNLPNEKVLPKHSLLYEYFTVYNELTKVKYVTEGMRKPAFLSGEQKKAIVDLLFKTNRKVTVKQLKEDYFKKIECFDSVEISGVEDRFNASLGTYHDLLKIIKDKDFLDNEENEDILEDIVLTLTLFEDREMIEERLKTYAHLFDDKVMKQLKRRRYTGWGRLSRKLINGIRDKQSGKTILDFLKSDGFANRNFMQLIHDDSLTFKEDIQKAQVSGQGDSLHEHIANLAGSPAIKKGILQTVKVVDELVKVMGRHKPENIVIEMARENQTTQKGQKNSRERMKRIEEGIKELGSQILKEHPVENTQLQNEKLYLYYLQNGRDMYVDQELDINRLSDYDVDHIVPQSFLKDDSIDNKVLTRSDKARGKSDNVPSEEVVKKMKNYWRQLLNAKLITQRKFDNLTKAERGGLSELDKAGFIKRQLVETRQITKHVAQILDSRMNTKYDENDKLIREVKVITLKSKLVSDFRKDFQFYKVREINNYHHAHDAYLNAVVGTALIKKYPKLESEFVYGDYKVYDVRKMIAKSEQEIGKATAKYFFYSNIMNFFKTEITLANGEIRKRPLIETNGETGEIVWDKGRDFATVRKVLSMPQVNIVKKTEVQTGGFSKESILPKRNSDKLIARKKDWDPKKYGGFDSPTVAYSVLVVAKVEKGKSKKLKSVKELLGITIMERSSFEKNPIDFLEAKGYKEVKKDLIIKLPKYSLFELENGRKRMLASAGELQKGNELALPSKYVNFLYLASHYEKLKGSPEDNEQKQLFVEQHKHYLDEIIEQISEFSKRVILADANLDKVLSAYNKHRDKPIREQAENIIHLFTLTNLGAPAAFKYFDTTIDRKRYTSTKEVLDATLIHQSITGLYETRIDLSQLGGDGGGGGEAAAKGSSGGMNPLQLLQPLPAEVKGTKLLAHWNSGATITCIPESFLEDEQPIKQTLIKTIHGEKQQNVYYLTFKVKGRKVEAEVIASPYEYILLSPTDVPWLTQQPLQLTILVPLQEYQDRILNKTALPEEQKQQLKALFTKYDNLWQHWENQVGHRKIRPHNIATGDYPPRPQKQYPINPKAKPSIQIVIDDLLKQGVLTPQNSTMNTPVYPVPKPDGRWRMVLDYREVNKTIPLTAAQNQHSAGILATIVRQKYKTTLDLANGFWAHPITPDSYWLTAFTWQGKQYCWTRLPQGFLNSPALFTADAVDLLKEVPNVQVYVDDIYLSHDNPHEHIQQLEKVFQILLQAGYVVSLKKSEIGQRTVEFLGFNITKEGRGLTDTFKTKLLNVTPPKDLKQLQSILGLLNFARNFIPNFAELVQTLYNLIASSKGKYIEWTEDNTKQLNKVIEALNTASNLEERLPDQRLVIKVNTSPSAGYVRYYNESGKKPIMYLNYVFSKAELKFSMLEKLLTTMHKALIKAMDLAMGQEILVYSPIVSMTKIQKTPLPERKALPIRWITWMTYLEDPRIQFHYDKTLPELKHIPDVYTSSIPPLKHPSQYEGVFCTDGSAIKSPDPTKSNNAGMGIVHAIYNPEYKILNQWSIPLGHHTAQMAEIAAVEFACKKALKVPGPVLVITDSFYVAESANKELPYWKSNGFVNNKKEPLKHISKWKSIAECLSIKPDITIQHEKGHQPINTSIHTEGNALADKLATQGSYVVNAGKRTADGSEFEKRTADGSEFESPKKKAKVE

SEQ ID NO: 7298 - protein, 2096 aa, synthetic construct
MPAAKRVKLDGGDKKYSIGLDIGTNSVGWAVITDEYKVPSKKFKVLGNTDRHSIKKNLIGALLFDSGETAEATRLKRTARRRYTRRKNRICYLQEIFSNEMAKVDDSFFHRLEESFLVEEDKKHERHPIFGNIVDEVAYHEKYPTIYHLRKKLVDSTDKADLRLIYLALAHMIKFRGHFLIEGDLNPDNSDVDKLFIQLVQTYNQLFEENPINASGVDAKAILSARLSKSRRLENLIAQLPGEKKNGLFGNLIALSLGLTPNFKSNFDLAEDAKLQLSKDTYDDDLDNLLAQIGDQYADLFLAAKNLSDAILLSDILRVNTEITKAPLSASMIKRYDEHHQDLTLLKALVRQQLPEKYKEIFFDQSKNGYAGYIDGGASQEEFYKFIKPILEKMDGTEELLVKLNREDLLRKQRTFDNGSIPHQIHLGELHAILRRQEDFYPFLKDNREKIEKILTFRIPYYVGPLARGNSRFAWMTRKSEETITPWNFEEVVDKGASAQSFIERMTNFDKNLPNEKVLPKHSLLYEYFTVYNELTKVKYVTEGMRKPAFLSGEQKKAIVDLLFKTNRKVTVKQLKEDYFKKIECFDSVEISGVEDRFNASLGTYHDLLKIIKDKDFLDNEENEDILEDIVLTLTLFEDREMIEERLKTYAHLFDDKVMKQLKRRRYTGWGRLSRKLINGIRDKQSGKTILDFLKSDGFANRNFMQLIHDDSLTFKEDIQKAQVSGQGDSLHEHIANLAGSPAIKKGILQTVKVVDELVKVMGRHKPENIVIEMARENQTTQKGQKNSRERMKRIEEGIKELGSQILKEHPVENTQLQNEKLYLYYLQNGRDMYVDQELDINRLSDYDVDHIVPQSFLKDDSIDNKVLTRSDKARGKSDNVPSEEVVKKMKNYWRQLLNAKLITQRKFDNLTKAERGGLSELDKAGFIKRQLVETRQITKHVAQILDSRMNTKYDENDKLIREVKVITLKSKLVSDFRKDFQFYKVREINNYHHAHDAYLNAVVGTALIKKYPKLESEFVYGDYKVYDVRKMIAKSEQEIGKATAKYFFYSNIMNFFKTEITLANGEIRKRPLIETNGETGEIVWDKGRDFATVRKVLSMPQVNIVKKTEVQTGGFSKESILPKRNSDKLIARKKDWDPKKYGGFDSPTVAYSVLVVAKVEKGKSKKLKSVKELLGITIMERSSFEKNPIDFLEAKGYKEVKKDLIIKLPKYSLFELENGRKRMLASAGELQKGNELALPSKYVNFLYLASHYEKLKGSPEDNEQKQLFVEQHKHYLDEIIEQISEFSKRVILADANLDKVLSAYNKHRDKPIREQAENIIHLFTLTNLGAPAAFKYFDTTIDRKRYTSTKEVLDATLIHQSITGLYETRIDLSQLGGDGGGGGEAAAKGSSGGTLNIEDEYRLHETSKEPDVPLGSTWLSDFPQAWAETGGMGLAVRQAPLIIPLKATSTPVSIKQYPMSQEARLGIKPHIQRLLDQGILVPCQSPWNTPLLPVKKPGTNDYRPVQDLREVNKRVEDIHPTVPNPYNLLSGLPPSHQWYTVLDLKDAFFCLRLHPTSQPLFAFEWRDPEMGISGQLTWTRLPQGFKNSPTLFNEALHRDLADFRIQHPDLILLQYVDDLLLAATSEQDCQRGTRALLQTLGNLGYRASAKKAQICQKQVKYLGYLLKEGQRWLTEARKETVMGQPTPKTPRQLREFLGTAGFCRLWIPGFAEMAAPLYPLTKPGTLFNWGPDQQKAYQEIKQALLTAPALGLPDLTKPFELFVDEKQGYAKGVLTQKLGPWRRPVAYLSKKLDPVAAGWPPCLRMVAAIAVLTKDAGKLTMGQPLVILAPHAVEALVKQPPDRWLSNARMTHYQAMLLDTDRVQFGPVVALNPATLLPLPEKEAPHDCLEILAETHGTRPDLTDQPIPDADYTWYTDGSSFLQEGQRRAGAAVTTETEVIWARALPAGTSAQRAELIALTQALKMAEGKKLNVYTDSRYAFATAHVHGEIYRRRGWLTSEGREIKNKNEILALLKALFLPKRLSIIHCPGHQKGNSAEARGNRMADQAAREAAMKAVLETSTLLAGKRTADGSEFEKRTADGSEFESPKKKAKVE

SEQ ID NO: 7299 - protein, 2102 aa, synthetic construct
MPAAKRVKLDGGDKKYSIGLDIGTNSVGWAVITDEYKVPSKKFKVLGNTDRHSIKKNLIGALLFDSGETAEATRLKRTARRRYTRRKNRICYLQEIFSNEMAKVDDSFFHRLEESFLVEEDKKHERHPIFGNIVDEVAYHEKYPTIYHLRKKLVDSTDKADLRLIYLALAHMIKFRGHFLIEGDLNPDNSDVDKLFIQLVQTYNQLFEENPINASGVDAKAILSARLSKSRRLENLIAQLPGEKKNGLFGNLIALSLGLTPNFKSNFDLAEDAKLQLSKDTYDDDLDNLLAQIGDQYADLFLAAKNLSDAILLSDILRVNTEITKAPLSASMIKRYDEHHQDLTLLKALVRQQLPEKYKEIFFDQSKNGYAGYIDGGASQEEFYKFIKPILEKMDGTEELLVKLNREDLLRKQRTFDNGSIPHQIHLGELHAILRRQEDFYPFLKDNREKIEKILTFRIPYYVGPLARGNSRFAWMTRKSEETITPWNFEEVVDKGASAQSFIERMTNFDKNLPNEKVLPKHSLLYEYFTVYNELTKVKYVTEGMRKPAFLSGEQKKAIVDLLFKTNRKVTVKQLKEDYFKKIECFDSVEISGVEDRFNASLGTYHDLLKIIKDKDFLDNEENEDILEDIVLTLTLFEDREMIEERLKTYAHLFDDKVMKQLKRRRYTGWGRLSRKLINGIRDKQSGKTILDFLKSDGFANRNFMQLIHDDSLTFKEDIQKAQVSGQGDSLHEHIANLAGSPAIKKGILQTVKVVDELVKVMGRHKPENIVIEMARENQTTQKGQKNSRERMKRIEEGIKELGSQILKEHPVENTQLQNEKLYLYYLQNGRDMYVDQELDINRLSDYDVDHIVPQSFLKDDSIDNKVLTRSDKARGKSDNVPSEEVVKKMKNYWRQLLNAKLITQRKFDNLTKAERGGLSELDKAGFIKRQLVETRQITKHVAQILDSRMNTKYDENDKLIREVKVITLKSKLVSDFRKDFQFYKVREINNYHHAHDAYLNAVVGTALIKKYPKLESEFVYGDYKVYDVRKMIAKSEQEIGKATAKYFFYSNIMNFFKTEITLANGEIRKRPLIETNGETGEIVWDKGRDFATVRKVLSMPQVNIVKKTEVQTGGFSKESILPKRNSDKLIARKKDWDPKKYGGFDSPTVAYSVLVVAKVEKGKSKKLKSVKELLGITIMERSSFEKNPIDFLEAKGYKEVKKDLIIKLPKYSLFELENGRKRMLASAGELQKGNELALPSKYVNFLYLASHYEKLKGSPEDNEQKQLFVEQHKHYLDEIIEQISEFSKRVILADANLDKVLSAYNKHRDKPIREQAENIIHLFTLTNLGAPAAFKYFDTTIDRKRYTSTKEVLDATLIHQSITGLYETRIDLSQLGGDGGGSSGGGEAAAKGGTVSLQDEHRLFDIPVTTSLPDVWLQDFPQAWAETGGLGRAKCQAPIIIDLKPTAVPVSIKQYPMSLEAHMGIRQHIIKFLELGVLRPCRSPWNTPLLPVKKPGTQDYRPVQDLREINKRTVDIHPTVPNPYNLLSTLKPDYSWYTVLDLKDAFFCLPLAPQSQELFAFEWKDPERGISGQLTWTRLPQGFKNSPTLFNEALHRDLTDFRTQHPEVTLLQYVDDLLLAAPTKKACTQGTRHLLQELGEKGYRASAKKAQICQTKVTYLGYILSEGKRWLTPGRIETVARIPPPRNPREVREFLGTAGFCRLWIPGFAELAAPLYALTKPSTPFTWQTEHQLAFEALKKALLSAPALGLPDTSKPFTLFLDERQGIAKGVLTQKLGPWKRPVAYLSKKLDPVAAGWPPCLRIMAATAMLVKDSAKLTLGQPLTVITPHTLEAIVRQPPDRWITNARLTHYQALLLDTDRVQFGPPVTLNPATLLPVPENQPSPHDCRQVLAETHGTREDLKDQELPDADHTWYTDGSSYLDSGTRRAGAAVVDGHNTIWAQSLPPGTSAQKAELIALTKALELSKGKKANIYTDSRYAFATAHTHGSIYERRGWLTSEGKEIKNKAEIIALLKALFLPQEVAIIHCPGHQKGQDPVAVGNRQADRVARQAAMAEVLTLATEPDNTSHITAGKRTADGSEFEKRTADGSEFESPKKKAKVE

SEQ ID NO: 7300 - protein, 2218 aa, synthetic construct
MPAAKRVKLDGGDKKYSIGLDIGTNSVGWAVITDEYKVPSKKFKVLGNTDRHSIKKNLIGALLFDSGETAEATRLKRTARRRYTRRKNRICYLQEIFSNEMAKVDDSFFHRLEESFLVEEDKKHERHPIFGNIVDEVAYHEKYPTIYHLRKKLVDSTDKADLRLIYLALAHMIKFRGHFLIEGDLNPDNSDVDKLFIQLVQTYNQLFEENPINASGVDAKAILSARLSKSRRLENLIAQLPGEKKNGLFGNLIALSLGLTPNFKSNFDLAEDAKLQLSKDTYDDDLDNLLAQIGDQYADLFLAAKNLSDAILLSDILRVNTEITKAPLSASMIKRYDEHHQDLTLLKALVRQQLPEKYKEIFFDQSKNGYAGYIDGGASQEEFYKFIKPILEKMDGTEELLVKLNREDLLRKQRTFDNGSIPHQIHLGELHAILRRQEDFYPFLKDNREKIEKILTFRIPYYVGPLARGNSRFAWMTRKSEETITPWNFEEVVDKGASAQSFIERMTNFDKNLPNEKVLPKHSLLYEYFTVYNELTKVKYVTEGMRKPAFLSGEQKKAIVDLLFKTNRKVTVKQLKEDYFKKIECFDSVEISGVEDRFNASLGTYHDLLKIIKDKDFLDNEENEDILEDIVLTLTLFEDREMIEERLKTYAHLFDDKVMKQLKRRRYTGWGRLSRKLINGIRDKQSGKTILDFLKSDGFANRNFMQLIHDDSLTFKEDIQKAQVSGQGDSLHEHIANLAGSPAIKKGILQTVKVVDELVKVMGRHKPENIVIEMARENQTTQKGQKNSRERMKRIEEGIKELGSQILKEHPVENTQLQNEKLYLYYLQNGRDMYVDQELDINRLSDYDVDHIVPQSFLKDDSIDNKVLTRSDKARGKSDNVPSEEVVKKMKNYWRQLLNAKLITQRKFDNLTKAERGGLSELDKAGFIKRQLVETRQITKHVAQILDSRMNTKYDENDKLIREVKVITLKSKLVSDFRKDFQFYKVREINNYHHAHDAYLNAVVGTALIKKYPKLESEFVYGDYKVYDVRKMIAKSEQEIGKATAKYFFYSNIMNFFKTEITLANGEIRKRPLIETNGETGEIVWDKGRDFATVRKVLSMPQVNIVKKTEVQTGGFSKESILPKRNSDKLIARKKDWDPKKYGGFDSPTVAYSVLVVAKVEKGKSKKLKSVKELLGITIMERSSFEKNPIDFLEAKGYKEVKKDLIIKLPKYSLFELENGRKRMLASAGELQKGNELALPSKYVNFLYLASHYEKLKGSPEDNEQKQLFVEQHKHYLDEIIEQISEFSKRVILADANLDKVLSAYNKHRDKPIREQAENIIHLFTLTNLGAPAAFKYFDTTIDRKRYTSTKEVLDATLIHQSITGLYETRIDLSQLGGDGGGSSGGGEAAAKGGTLGDQGSRGSDPLPEPRVTLTVEGIPTEFLVNTGAEHSVLTKPMGKMGSKRTVVAGATGSKVYPWTTKRLLKIGQKQVTHSFLVIPECPAPLLGRDLLTKLKAQIQFSTEGPQVTWEDRPAMCLVLNLEEEYRLHEKPVPPSIDPSWLQLFPMVWAEKAGMGLANQVPPVVVELKSDASPVAVRQYPMSKEAREGIRPHIQRFLDLGILVPCQSPWNTPLLPVKKPGTNDYRPVQDLREVNKRVQDIHPTVPNPYNLLSSLPPSHTWYSVLDLKDAFFCLKLHPNSQPLFAFEWRDPEKGNTGQLTWTRLPQGFKNSPTLFDEALHRDLASFRALNPQVVMLQYVDDLLVAAPTYRDCKEGTRRLLQELSKLGYRVSAKKAQLCREEVTYLGYLLKGGKRWLTPARKATVMKIPTPTTPRQVREFLGTAGFCRLWIPGFASLAAPLYPLTREKVPFTWTEAHQEAFGRIKEALLSAPALALPDLTKPFALYVDEKEGVARGVLTQTLGPWRRPVAYLSKKLDPVASGWPTCLKAIAAVALLLKDADKLTLGQNVLVIAPHNLESIVRQPPDRWMTNARMTHYQSLLLNERVSFAPPAILNPATLLPVESDDTPIHICSEILAEETGTRPDLRDQPLPGVPAWYTDGSSFIMDGRRQAGAAIVDNKRTVWASNLPEGTSAQKAELIALTQALRLAEGKSINIYTDSRYAFATAHVHGAIYKQRGLLTSAGKDIKNKEEILALLEAIHLPKRVAIIHCPGHQRGTDPVATGNRKADEAAKQAAQSTRILTETTKNAGKRTADGSEFEKRTADGSEFESPKKKAKVE

SEQ ID NO: 7301 - protein, 2127 aa, synthetic construct
MPAAKRVKLDGGDKKYSIGLDIGTNSVGWAVITDEYKVPSKKFKVLGNTDRHSIKKNLIGALLFDSGETAEATRLKRTARRRYTRRKNRICYLQEIFSNEMAKVDDSFFHRLEESFLVEEDKKHERHPIFGNIVDEVAYHEKYPTIYHLRKKLVDSTDKADLRLIYLALAHMIKFRGHFLIEGDLNPDNSDVDKLFIQLVQTYNQLFEENPINASGVDAKAILSARLSKSRRLENLIAQLPGEKKNGLFGNLIALSLGLTPNFKSNFDLAEDAKLQLSKDTYDDDLDNLLAQIGDQYADLFLAAKNLSDAILLSDILRVNTEITKAPLSASMIKRYDEHHQDLTLLKALVRQQLPEKYKEIFFDQSKNGYAGYIDGGASQEEFYKFIKPILEKMDGTEELLVKLNREDLLRKQRTFDNGSIPHQIHLGELHAILRRQEDFYPFLKDNREKIEKILTFRIPYYVGPLARGNSRFAWMTRKSEETITPWNFEEVVDKGASAQSFIERMTNFDKNLPNEKVLPKHSLLYEYFTVYNELTKVKYVTEGMRKPAFLSGEQKKAIVDLLFKTNRKVTVKQLKEDYFKKIECFDSVEISGVEDRFNASLGTYHDLLKIIKDKDFLDNEENEDILEDIVLTLTLFEDREMIEERLKTYAHLFDDKVMKQLKRRRYTGWGRLSRKLINGIRDKQSGKTILDFLKSDGFANRNFMQLIHDDSLTFKEDIQKAQVSGQGDSLHEHIANLAGSPAIKKGILQTVKVVDELVKVMGRHKPENIVIEMARENQTTQKGQKNSRERMKRIEEGIKELGSQILKEHPVENTQLQNEKLYLYYLQNGRDMYVDQELDINRLSDYDVDHIVPQSFLKDDSIDNKVLTRSDKARGKSDNVPSEEVVKKMKNYWRQLLNAKLITQRKFDNLTKAERGGLSELDKAGFIKRQLVETRQITKHVAQILDSRMNTKYDENDKLIREVKVITLKSKLVSDFRKDFQFYKVREINNYHHAHDAYLNAVVGTALIKKYPKLESEFVYGDYKVYDVRKMIAKSEQEIGKATAKYFFYSNIMNFFKTEITLANGEIRKRPLIETNGETGEIVWDKGRDFATVRKVLSMPQVNIVKKTEVQTGGFSKESILPKRNSDKLIARKKDWDPKKYGGFDSPTVAYSVLVVAKVEKGKSKKLKSVKELLGITIMERSSFEKNPIDFLEAKGYKEVKKDLIIKLPKYSLFELENGRKRMLASAGELQKGNELALPSKYVNFLYLASHYEKLKGSPEDNEQKQLFVEQHKHYLDEIIEQISEFSKRVILADANLDKVLSAYNKHRDKPIREQAENIIHLFTLTNLGAPAAFKYFDTTIDRKRYTSTKEVLDATLIHQSITGLYETRIDLSQLGGDGGGSSGGGEAAAKGGLLGRDLLTKLKAQIQFSTEGPQVTWEDRPAMCLVLNLEEEYRLHEKPVPPSIDPSWLQLFPMVWAEKAGMGLANQVPPVVVELKSDASPVAVRQYPMSKEAREGIRPHIQRFLDLGILVPCQSPWNTPLLPVKKPGTNDYRPVQDLREVNKRVQDIHPTVPNPYNLLSSLPPSHTWYSVLDLKDAFFCLKLHPNSQPLFAFEWRDPEKGNTGQLTWTRLPQGFKNSPTLFNEALHRDLASFRALNPQVVMLQYVDDLLVAAPTYRDCKEGTRRLLQELSKLGYRVSAKKAQLCREEVTYLGYLLKGGKRWLTPARKATVMKIPTPTTPRQVREFLGTAGFCRLWIPGFASLAAPLYPLTRPKVPFTWTEAHQEAFGRIKEALLSAPALALPDLTKPFALYVDEKEGVARGVLTQTLGPWRRPVAYLSKKLDPVASGWPTCLKAIAAVALLLKDADKLTLGQNVLVIAPHNLESIVRQPPDRWMTNARMTHYQSLLLNERVSFAPPAILNPATLLPVESDDTPIHICSEILAEETGTRPDLRDQPLPGVPAWYTDGSSFIMDGRRQAGAAIVDNKRTVWASNLPEGTSAQKAELIALTQALRLAEGKSINIYTDSRYAFATAHVHGAIYKQRGWLTSAGKDIKNKEEILALLEAIHLPKRVAIIHCPGHQRGTDPVATGNRKADEAAKQAAQSTRILTETTKNAGKRTADGSEFEKRTADGSEFESPKKKAKVE

SEQ ID NO: 7302 - protein, 2096 aa, synthetic construct
MPAAKRVKLDGGDKKYSIGLDIGTNSVGWAVITDEYKVPSKKFKVLGNTDRHSIKKNLIGALLFDSGETAEATRLKRTARRRYTRRKNRICYLQEIFSNEMAKVDDSFFHRLEESFLVEEDKKHERHPIFGNIVDEVAYHEKYPTIYHLRKKLVDSTDKADLRLIYLALAHMIKFRGHFLIEGDLNPDNSDVDKLFIQLVQTYNQLFEENPINASGVDAKAILSARLSKSRRLENLIAQLPGEKKNGLFGNLIALSLGLTPNFKSNFDLAEDAKLQLSKDTYDDDLDNLLAQIGDQYADLFLAAKNLSDAILLSDILRVNTEITKAPLSASMIKRYDEHHQDLTLLKALVRQQLPEKYKEIFFDQSKNGYAGYIDGGASQEEFYKFIKPILEKMDGTEELLVKLNREDLLRKQRTFDNGSIPHQIHLGELHAILRRQEDFYPFLKDNREKIEKILTFRIPYYVGPLARGNSRFAWMTRKSEETITPWNFEEVVDKGASAQSFIERMTNFDKNLPNEKVLPKHSLLYEYFTVYNELTKVKYVTEGMRKPAFLSGEQKKAIVDLLFKTNRKVTVKQLKEDYFKKIECFDSVEISGVEDRFNASLGTYHDLLKIIKDKDFLDNEENEDILEDIVLTLTLFEDREMIEERLKTYAHLFDDKVMKQLKRRRYTGWGRLSRKLINGIRDKQSGKTILDFLKSDGFANRNFMQLIHDDSLTFKEDIQKAQVSGQGDSLHEHIANLAGSPAIKKGILQTVKVVDELVKVMGRHKPENIVIEMARENQTTQKGQKNSRERMKRIEEGIKELGSQILKEHPVENTQLQNEKLYLYYLQNGRDMYVDQELDINRLSDYDVDHIVPQSFLKDDSIDNKVLTRSDKARGKSDNVPSEEVVKKMKNYWRQLLNAKLITQRKFDNLTKAERGGLSELDKAGFIKRQLVETRQITKHVAQILDSRMNTKYDENDKLIREVKVITLKSKLVSDFRKDFQFYKVREINNYHHAHDAYLNAVVGTALIKKYPKLESEFVYGDYKVYDVRKMIAKSEQEIGKATAKYFFYSNIMNFFKTEITLANGEIRKRPLIETNGETGEIVWDKGRDFATVRKVLSMPQVNIVKKTEVQTGGFSKESILPKRNSDKLIARKKDWDPKKYGGFDSPTVAYSVLVVAKVEKGKSKKLKSVKELLGITIMERSSFEKNPIDFLEAKGYKEVKKDLIIKLPKYSLFELENGRKRMLASAGELQKGNELALPSKYVNFLYLASHYEKLKGSPEDNEQKQLFVEQHKHYLDEIIEQISEFSKRVILADANLDKVLSAYNKHRDKPIREQAENIIHLFTLTNLGAPAAFKYFDTTIDRKRYTSTKEVLDATLIHQSITGLYETRIDLSQLGGDGGGSSGGGEAAAKGGTLNIEDEYRLHETSKGPDVPLGSTWLSDFPQAWAETGGMGLAVRQAPLIIPLKATSTPVSIKQYPMSQEARLGIKPHIQRLLDQGILVPCQSPWNTPLLPVKKPGTNDYRPVQDLREVNKRVEDIHPTVPNPYNLLSGLPPSHQWYTVLDLKDAFFCLRLHPTSQSLFAFEWRDPEMGISGQLTWTRLPQGFKNSPTLFNEALHRDLADFRIQHPDLILLQYVDDLLLAATSELDCQQGTRALLQTLGDLGYRASAKKAQICQKQVKYLGYLLKEGQRWLTEARKETVMGQPTPKTPRQLREFLGTAGFCRLWIPGFAEMAAPLYPLTKPGTLFEWGPDQQKAYQEIKQALLTAPALGLPDLTKPFELFVDEKQGYAKGVLTQKLGPWRRPVAYLSKKLDPVAAGWPPCLRMVAAIAVLTKDAGKLTMGQPLVILAPHAVEALVKQPPDRWLSNARMTHYQALLLDTDRVQFGPIVALNPATLLPLPEEGLQHDCLDILAEAHGTRPDLTDQPLPDADHTWYTDGSSFLQEGQRKAGAAVTTETEVVWAKALPAGTSAQRAELIALTQALKMAEGKKLNVYTDSRYAFATAHIHGEIYRRRGWLTSEGKEIKNKDEILALLKALFLPKRLSIIHCPGHQKGNRAEARGNRMADQAAREVATRETPETSTLLAGKRTADGSEFEKRTADGSEFESPKKKAKVE

SEQ ID NO: 7303 - protein, 2090 aa, synthetic construct
MPAAKRVKLDGGDKKYSIGLDIGTNSVGWAVITDEYKVPSKKFKVLGNTDRHSIKKNLIGALLFDSGETAEATRLKRTARRRYTRRKNRICYLQEIFSNEMAKVDDSFFHRLEESFLVEEDKKHERHPIFGNIVDEVAYHEKYPTIYHLRKKLVDSTDKADLRLIYLALAHMIKFRGHFLIEGDLNPDNSDVDKLFIQLVQTYNQLFEENPINASGVDAKAILSARLSKSRRLENLIAQLPGEKKNGLFGNLIALSLGLTPNFKSNFDLAEDAKLQLSKDTYDDDLDNLLAQIGDQYADLFLAAKNLSDAILLSDILRVNTEITKAPLSASMIKRYDEHHQDLTLLKALVRQQLPEKYKEIFFDQSKNGYAGYIDGGASQEEFYKFIKPILEKMDGTEELLVKLNREDLLRKQRTFDNGSIPHQIHLGELHAILRRQEDFYPFLKDNREKIEKILTFRIPYYVGPLARGNSRFAWMTRKSEETITPWNFEEVVDKGASAQSFIERMTNFDKNLPNEKVLPKHSLLYEYFTVYNELTKVKYVTEGMRKPAFLSGEQKKAIVDLLFKTNRKVTVKQLKEDYFKKIECFDSVEISGVEDRFNASLGTYHDLLKIIKDKDFLDNEENEDILEDIVLTLTLFEDREMIEERLKTYAHLFDDKVMKQLKRRRYTGWGRLSRKLINGIRDKQSGKTILDFLKSDGFANRNFMQLIHDDSLTFKEDIQKAQVSGQGDSLHEHIANLAGSPAIKKGILQTVKVVDELVKVMGRHKPENIVIEMARENQTTQKGQKNSRERMKRIEEGIKELGSQILKEHPVENTQLQNEKLYLYYLQNGRDMYVDQELDINRLSDYDVDHIVPQSFLKDDSIDNKVLTRSDKARGKSDNVPSEEVVKKMKNYWRQLLNAKLITQRKFDNLTKAERGGLSELDKAGFIKRQLVETRQITKHVAQILDSRMNTKYDENDKLIREVKVITLKSKLVSDFRKDFQFYKVREINNYHHAHDAYLNAVVGTALIKKYPKLESEFVYGDYKVYDVRKMIAKSEQEIGKATAKYFFYSNIMNFFKTEITLANGEIRKRPLIETNGETGEIVWDKGRDFATVRKVLSMPQVNIVKKTEVQTGGFSKESILPKRNSDKLIARKKDWDPKKYGGFDSPTVAYSVLVVAKVEKGKSKKLKSVKELLGITIMERSSFEKNPIDFLEAKGYKEVKKDLIIKLPKYSLFELENGRKRMLASAGELQKGNELALPSKYVNFLYLASHYEKLKGSPEDNEQKQLFVEQHKHYLDEIIEQISEFSKRVILADANLDKVLSAYNKHRDKPIREQAENIIHLFTLTNLGAPAAFKYFDTTIDRKRYTSTKEVLDATLIHQSITGLYETRIDLSQLGGDGGGSSGGGEAAAKGGTLQLDDEYRLYSPLVKPDQNIQFWLEQFPQAWAETAGMGLAKQVPPQVIQLKASATPVSVRQYPLSKEAQEGIRPHVQRLIQQGILVPVQSPWNTPLLPVRKPGTNDYRPVQDLREVNKRVQDIHPTVPNPYNLLCALPPQRSWYTVLDLKDAFFCLRLHPTSQPLFAFEWRDPGTGRTGQLTWTRLPQGFKNSPTIFDEALHRDLANFRIQHPQVTLLQYVDDLLLAGATKQDCLEGTKALLLELSDLGYRASAKKAQICRREVTYLGYSLRDGQRWLTEARKKTVVQIPAPTTAKQVREFLGTAGFCRLWIPGFATLAAPLYPLTKEKGEFSWAPEHQKAFDAIKKALLSAPALALPDVTKPFTLYVDERKGVARGVLTQTLGPWRRPVAYLSKKLDPVASGWPVCLKAIAAVAILVKDADKLTLGQNITVIAPHALENIVRQPPDRWMTNARMTHYQSLLLTERVTFAPPAALNPATLLPEETDEPVTHDCHQLLIEETGVRKDLTDIPLTGEVLTWFTDGSSYVVEGKRMAGAAVVDGTRTIWASSLPEGTSAQKAELMALTQALRLAEGKSINIYTDSRYAFATAHVHGAIYKQRGLLTSAGREIKNKEEILSLLEALHLPKRLAIIHCPGHQKAKDPISRGNQMADRVAKQAAQGVNLLAGKRTADGSEFEKRTADGSEFESPKKKAKVE

SEQ ID NO: 7304 - protein, 2087 aa, synthetic construct
MPAAKRVKLDGGDKKYSIGLDIGTNSVGWAVITDEYKVPSKKFKVLGNTDRHSIKKNLIGALLFDSGETAEATRLKRTARRRYTRRKNRICYLQEIFSNEMAKVDDSFFHRLEESFLVEEDKKHERHPIFGNIVDEVAYHEKYPTIYHLRKKLVDSTDKADLRLIYLALAHMIKFRGHFLIEGDLNPDNSDVDKLFIQLVQTYNQLFEENPINASGVDAKAILSARLSKSRRLENLIAQLPGEKKNGLFGNLIALSLGLTPNFKSNFDLAEDAKLQLSKDTYDDDLDNLLAQIGDQYADLFLAAKNLSDAILLSDILRVNTEITKAPLSASMIKRYDEHHQDLTLLKALVRQQLPEKYKEIFFDQSKNGYAGYIDGGASQEEFYKFIKPILEKMDGTEELLVKLNREDLLRKQRTFDNGSIPHQIHLGELHAILRRQEDFYPFLKDNREKIEKILTFRIPYYVGPLARGNSRFAWMTRKSEETITPWNFEEVVDKGASAQSFIERMTNFDKNLPNEKVLPKHSLLYEYFTVYNELTKVKYVTEGMRKPAFLSGEQKKAIVDLLFKTNRKVTVKQLKEDYFKKIECFDSVEISGVEDRFNASLGTYHDLLKIIKDKDFLDNEENEDILEDIVLTLTLFEDREMIEERLKTYAHLFDDKVMKQLKRRRYTGWGRLSRKLINGIRDKQSGKTILDFLKSDGFANRNFMQLIHDDSLTFKEDIQKAQVSGQGDSLHEHIANLAGSPAIKKGILQTVKVVDELVKVMGRHKPENIVIEMARENQTTQKGQKNSRERMKRIEEGIKELGSQILKEHPVENTQLQNEKLYLYYLQNGRDMYVDQELDINRLSDYDVDHIVPQSFLKDDSIDNKVLTRSDKARGKSDNVPSEEVVKKMKNYWRQLLNAKLITQRKFDNLTKAERGGLSELDKAGFIKRQLVETRQITKHVAQILDSRMNTKYDENDKLIREVKVITLKSKLVSDFRKDFQFYKVREINNYHHAHDAYLNAVVGTALIKKYPKLESEFVYGDYKVYDVRKMIAKSEQEIGKATAKYFFYSNIMNFFKTEITLANGEIRKRPLIETNGETGEIVWDKGRDFATVRKVLSMPQVNIVKKTEVQTGGFSKESILPKRNSDKLIARKKDWDPKKYGGFDSPTVAYSVLVVAKVEKGKSKKLKSVKELLGITIMERSSFEKNPIDFLEAKGYKEVKKDLIIKLPKYSLFELENGRKRMLASAGELQKGNELALPSKYVNFLYLASHYEKLKGSPEDNEQKQLFVEQHKHYLDEIIEQISEFSKRVILADANLDKVLSAYNKHRDKPIREQAENIIHLFTLTNLGAPAAFKYFDTTIDRKRYTSTKEVLDATLIHQSITGLYETRIDLSQLGGDGGGSSGGGEAAAKGGIPWLMKKPLQLTTLVPLQEYEERLLKQTMLTGSYKEKLQSLFLKYDALWQHWENQVGHRRIKPHHIATGTVNPRPQKQYPINPKAKASIQTVINDLLKQGVLIQQNSIMNTPVYPVPKPDGKWRMVLDYREVNKTIPLIAAQNQHSAGILSSIFRGKYKTTLDLSNGFWAHSITPESYWLTAFTWLGQQYCWTRLPQGFLNSPALFNADVVDLLKEVPNVQVYVDDIYISHDDPREHLEQLEKVFSLLLNAGYVVSLKKSEIAQHEVEFLGFNITKEGRGLTETFKQKLLNITPPRDLKQLQSILGKLNFARNFIPNFSELVKPLYNIIATAPGKYITWTTDNSQQLQNIISMLNSAENLEERNPEVRLIMKVNTSPSAGYIRFYNEFAKRPIMYLNYVYTKAEVKFTNTEKLLTTIHKGLIKALDLGMGQEILVYSPIVSMTKIQKTPLPERKALPIRWITWMSYLEDPRIQFHYDKTLPELQQVPTVTDDIIAKIKHPSEFSMVFYTDGSAIKHPNVNKSHNAGMGIAQVQFKPEFTVINTWSIPLGDHTAQLAEVAAVEFACKKALKIDGPVLIVTDSFYVAESVNKELPYWQSNGFFNNKKKPLKHVSKWKSIADCIQLKPDIIIIHEKGHQPTASTFHTEGNNLADKLATQGSYVVNAGKRTADGSEFEKRTADGSEFESPKKKAKVE

SEQ ID NO: 7305 - protein, 2176 aa, synthetic construct
MPAAKRVKLDGGDKKYSIGLDIGTNSVGWAVITDEYKVPSKKFKVLGNTDRHSIKKNLIGALLFDSGETAEATRLKRTARRRYTRRKNRICYLQEIFSNEMAKVDDSFFHRLEESFLVEEDKKHERHPIFGNIVDEVAYHEKYPTIYHLRKKLVDSTDKADLRLIYLALAHMIKFRGHFLIEGDLNPDNSDVDKLFIQLVQTYNQLFEENPINASGVDAKAILSARLSKSRRLENLIAQLPGEKKNGLFGNLIALSLGLTPNFKSNFDLAEDAKLQLSKDTYDDDLDNLLAQIGDQYADLFLAAKNLSDAILLSDILRVNTEITKAPLSASMIKRYDEHHQDLTLLKALVRQQLPEKYKEIFFDQSKNGYAGYIDGGASQEEFYKFIKPILEKMDGTEELLVKLNREDLLRKQRTFDNGSIPHQIHLGELHAILRRQEDFYPFLKDNREKIEKILTFRIPYYVGPLARGNSRFAWMTRKSEETITPWNFEEVVDKGASAQSFIERMTNFDKNLPNEKVLPKHSLLYEYFTVYNELTKVKYVTEGMRKPAFLSGEQKKAIVDLLFKTNRKVTVKQLKEDYFKKIECFDSVEISGVEDRFNASLGTYHDLLKIIKDKDFLDNEENEDILEDIVLTLTLFEDREMIEERLKTYAHLFDDKVMKQLKRRRYTGWGRLSRKLINGIRDKQSGKTILDFLKSDGFANRNFMQLIHDDSLTFKEDIQKAQVSGQGDSLHEHIANLAGSPAIKKGILQTVKVVDELVKVMGRHKPENIVIEMARENQTTQKGQKNSRERMKRIEEGIKELGSQILKEHPVENTQLQNEKLYLYYLQNGRDMYVDQELDINRLSDYDVDHIVPQSFLKDDSIDNKVLTRSDKARGKSDNVPSEEVVKKMKNYWRQLLNAKLITQRKFDNLTKAERGGLSELDKAGFIKRQLVETRQITKHVAQILDSRMNTKYDENDKLIREVKVITLKSKLVSDFRKDFQFYKVREINNYHHAHDAYLNAVVGTALIKKYPKLESEFVYGDYKVYDVRKMIAKSEQEIGKATAKYFFYSNIMNFFKTEITLANGEIRKRPLIETNGETGEIVWDKGRDFATVRKVLSMPQVNIVKKTEVQTGGFSKESILPKRNSDKLIARKKDWDPKKYGGFDSPTVAYSVLVVAKVEKGKSKKLKSVKELLGITIMERSSFEKNPIDFLEAKGYKEVKKDLIIKLPKYSLFELENGRKRMLASAGELQKGNELALPSKYVNFLYLASHYEKLKGSPEDNEQKQLFVEQHKHYLDEIIEQISEFSKRVILADANLDKVLSAYNKHRDKPIREQAENIIHLFTLTNLGAPAAFKYFDTTIDRKRYTSTKEVLDATLIHQSITGLYETRIDLSQLGGDGGGSSGGGEAAAKGGMDPLQLLQPLEAEIKGTKLKAHWNSGATITCVPQAFLEEEVPIKNIWIKTIHGEKEQPVYYLTFKIQGRKVEAEVISSPYDYILVSPSDIPWLMKKPLQLTTLVPLQEYEERLLKQTMLTGSYKEKLQSLFLKYDALWQHWENQVGHRRIKPHHIATGTVNPRPQKQYPINPKAKASIQTVINDLLKQGVLIQQNSIMNTPVYPVPKPDGKWRMVLDYREVNKTIPLIAAQNQHSAGILSSIFRGKYKTTLDLSNGFWAHSITPESYWLTAFTWLGQQYCWTRLPQGFLNSPALFNADVVDLLKEVPNVQVYVDDIYISHDDPREHLEQLEKVFSLLLNAGYVVSLKKSEIAQHEVEFLGFNITKEGRGLTETFKQKLLNITPPRDLKQLQSILGLLNFARNFIPNFSELVKPLYNIIATAPGKYITWTTDNSQQLQNIISMLNSAENLEERNPEVRLIMKVNTSPSAGYIRFYNEFAKRPIMYLNYVYTKAEVKFTNTEKLLTTIHKGLIKALDLGMGQEILVYSPIVSMTKIQKTPLPERKALPIRWITWMSYLEDPRIQFHYDKTLPELQQVPTVTDDIIAKIKHPSEFSMVFYTDGSAIKHPNVNKSHNAGMGIAQVQFKPEFTVINTWSIPLGDHTAQLAEVAAVEFACKKALKIDGPVLIVTDSFYVAESVNKELPYWQSNGFFNNKKKPLKHVSKWKSIADCIQLKPDIIIIHEKGHQPTASTFHTEGNNLADKLATQGSYVVNAGKRTADGSEFEKRTADGSEFESPKKKAKVE

SEQ ID NO: 7306 - protein, 2094 aa, synthetic construct
MPAAKRVKLDGGDKKYSIGLDIGTNSVGWAVITDEYKVPSKKFKVLGNTDRHSIKKNLIGALLFDSGETAEATRLKRTARRRYTRRKNRICYLQEIFSNEMAKVDDSFFHRLEESFLVEEDKKHERHPIFGNIVDEVAYHEKYPTIYHLRKKLVDSTDKADLRLIYLALAHMIKFRGHFLIEGDLNPDNSDVDKLFIQLVQTYNQLFEENPINASGVDAKAILSARLSKSRRLENLIAQLPGEKKNGLFGNLIALSLGLTPNFKSNFDLAEDAKLQLSKDTYDDDLDNLLAQIGDQYADLFLAAKNLSDAILLSDILRVNTEITKAPLSASMIKRYDEHHQDLTLLKALVRQQLPEKYKEIFFDQSKNGYAGYIDGGASQEEFYKFIKPILEKMDGTEELLVKLNREDLLRKQRTFDNGSIPHQIHLGELHAILRRQEDFYPFLKDNREKIEKILTFRIPYYVGPLARGNSRFAWMTRKSEETITPWNFEEVVDKGASAQSFIERMTNFDKNLPNEKVLPKHSLLYEYFTVYNELTKVKYVTEGMRKPAFLSGEQKKAIVDLLFKTNRKVTVKQLKEDYFKKIECFDSVEISGVEDRFNASLGTYHDLLKIIKDKDFLDNEENEDILEDIVLTLTLFEDREMIEERLKTYAHLFDDKVMKQLKRRRYTGWGRLSRKLINGIRDKQSGKTILDFLKSDGFANRNFMQLIHDDSLTFKEDIQKAQVSGQGDSLHEHIANLAGSPAIKKGILQTVKVVDELVKVMGRHKPENIVIEMARENQTTQKGQKNSRERMKRIEEGIKELGSQILKEHPVENTQLQNEKLYLYYLQNGRDMYVDQELDINRLSDYDVDHIVPQSFLKDDSIDNKVLTRSDKARGKSDNVPSEEVVKKMKNYWRQLLNAKLITQRKFDNLTKAERGGLSELDKAGFIKRQLVETRQITKHVAQILDSRMNTKYDENDKLIREVKVITLKSKLVSDFRKDFQFYKVREINNYHHAHDAYLNAVVGTALIKKYPKLESEFVYGDYKVYDVRKMIAKSEQEIGKATAKYFFYSNIMNFFKTEITLANGEIRKRPLIETNGETGEIVWDKGRDFATVRKVLSMPQVNIVKKTEVQTGGFSKESILPKRNSDKLIARKKDWDPKKYGGFDSPTVAYSVLVVAKVEKGKSKKLKSVKELLGITIMERSSFEKNPIDFLEAKGYKEVKKDLIIKLPKYSLFELENGRKRMLASAGELQKGNELALPSKYVNFLYLASHYEKLKGSPEDNEQKQLFVEQHKHYLDEIIEQISEFSKRVILADANLDKVLSAYNKHRDKPIREQAENIIHLFTLTNLGAPAAFKYFDTTIDRKRYTSTKEVLDATLIHQSITGLYETRIDLSQLGGDGGGSSGGGEAAAKGGVLNLEEEYRLHEKPVPSSIDPSWLQLFPTVWAERAGMGLANQVPPVVVELRSGASPVAVRQYPMSKEAREGIRPHIQRFLDLGVLVPCQSPWNTPLLPVKKPGTNDYRPVQDLREINKRVQDIHPTVPNPYNLLSSLPPSHTWYSVLDLKDAFFCLKLHPNSQPLFAFEWRDPEKGNTGQLTWTRLPQGFKNSPTLFNEALHRDLAPFRALNPQVVLLQYVDDLLVAAPTYRDCKEGTQKLLQELSKLGYRVSAKKAQLCQKEVTYLGYLLKEGKRWLTPARKATVMKIPPPTTPRQVREFLGTAGFCRLWIPGFASLAAPLYPLTKPSIPFIWTEEHQKAFDRIKEALLSAPALALPDLTKPFTLYVDERAGVARGVLTQTLGPWRRPVAYLSKKLDPVASGWPTCLKAVAAVALLLKDADKLTLGQNVTVIASHSLESIVRQPPDRWMTNARMTHYQSLLLNERVSFAPPAVLNPATLLPVESEATPVHRCSEILAEETGTRRDLKDQPLPGVPAWYTDGSSFIAEGKRRAGAAIVDGKRTVWASSLPEGTSAQKAELVALTQALRLAEGKDINIYTDSRYAFATAHIHGAIYKQRGWLTSAGKDIKNKEEILALLEAIHLPKRVAIIHCPGHQKGNDPVATGNRRADEAAKQAALSTRVLAETTKPAGKRTADGSEFEKRTADGSEFESPKKKAKVE

SEQ ID NO: 7307 - protein, 2102 aa, synthetic construct
MPAAKRVKLDGGDKKYSIGLDIGTNSVGWAVITDEYKVPSKKFKVLGNTDRHSIKKNLIGALLFDSGETAEATRLKRTARRRYTRRKNRICYLQEIFSNEMAKVDDSFFHRLEESFLVEEDKKHERHPIFGNIVDEVAYHEKYPTIYHLRKKLVDSTDKADLRLIYLALAHMIKFRGHFLIEGDLNPDNSDVDKLFIQLVQTYNQLFEENPINASGVDAKAILSARLSKSRRLENLIAQLPGEKKNGLFGNLIALSLGLTPNFKSNFDLAEDAKLQLSKDTYDDDLDNLLAQIGDQYADLFLAAKNLSDAILLSDILRVNTEITKAPLSASMIKRYDEHHQDLTLLKALVRQQLPEKYKEIFFDQSKNGYAGYIDGGASQEEFYKFIKPILEKMDGTEELLVKLNREDLLRKQRTFDNGSIPHQIHLGELHAILRRQEDFYPFLKDNREKIEKILTFRIPYYVGPLARGNSRFAWMTRKSEETITPWNFEEVVDKGASAQSFIERMTNFDKNLPNEKVLPKHSLLYEYFTVYNELTKVKYVTEGMRKPAFLSGEQKKAIVDLLFKTNRKVTVKQLKEDYFKKIECFDSVEISGVEDRFNASLGTYHDLLKIIKDKDFLDNEENEDILEDIVLTLTLFEDREMIEERLKTYAHLFDDKVMKQLKRRRYTGWGRLSRKLINGIRDKQSGKTILDFLKSDGFANRNFMQLIHDDSLTFKEDIQKAQVSGQGDSLHEHIANLAGSPAIKKGILQTVKVVDELVKVMGRHKPENIVIEMARENQTTQKGQKNSRERMKRIEEGIKELGSQILKEHPVENTQLQNEKLYLYYLQNGRDMYVDQELDINRLSDYDVDHIVPQSFLKDDSIDNKVLTRSDKARGKSDNVPSEEVVKKMKNYWRQLLNAKLITQRKFDNLTKAERGGLSELDKAGFIKRQLVETRQITKHVAQILDSRMNTKYDENDKLIREVKVITLKSKLVSDFRKDFQFYKVREINNYHHAHDAYLNAVVGTALIKKYPKLESEFVYGDYKVYDVRKMIAKSEQEIGKATAKYFFYSNIMNFFKTEITLANGEIRKRPLIETNGETGEIVWDKGRDFATVRKVLSMPQVNIVKKTEVQTGGFSKESILPKRNSDKLIARKKDWDPKKYGGFDSPTVAYSVLVVAKVEKGKSKKLKSVKELLGITIMERSSFEKNPIDFLEAKGYKEVKKDLIIKLPKYSLFELENGRKRMLASAGELQKGNELALPSKYVNFLYLASHYEKLKGSPEDNEQKQLFVEQHKHYLDEIIEQISEFSKRVILADANLDKVLSAYNKHRDKPIREQAENIIHLFTLTNLGAPAAFKYFDTTIDRKRYTSTKEVLDATLIHQSITGLYETRIDLSQLGGDGGGSSEAAAKGGGGGTVSLQDEHRLFDIPVTTSLPDVWLQDFPQAWAETGGLGRAKCQAPIIIDLKPTAVPVSIKQYPMSLEAHMGIRQHIIKFLELGVLRPCRSPWNTPLLPVKKPGTQDYRPVQDLREINKRTVDIHPTVPNPYNLLSTLKPDYSWYTVLDLKDAFFCLPLAPQSQELFAFEWKDPERGISGQLTWTRLPQGFKNSPTLFNEALHRDLTDFRTQHPEVTLLQYVDDLLLAAPTKKACTQGTRHLLQELGEKGYRASAKKAQICQTKVTYLGYILSEGKRWLTPGRIETVARIPPPRNPREVREFLGTAGFCRLWIPGFAELAAPLYALTKPSTPFTWQTEHQLAFEALKKALLSAPALGLPDTSKPFTLFLDERQGIAKGVLTQKLGPWKRPVAYLSKKLDPVAAGWPPCLRIMAATAMLVKDSAKLTLGQPLTVITPHTLEAIVRQPPDRWITNARLTHYQALLLDTDRVQFGPPVTLNPATLLPVPENQPSPHDCRQVLAETHGTREDLKDQELPDADHTWYTDGSSYLDSGTRRAGAAVVDGHNTIWAQSLPPGTSAQKAELIALTKALELSKGKKANIYTDSRYAFATAHTHGSIYERRGWLTSEGKEIKNKAEIIALLKALFLPQEVAIIHCPGHQKGQDPVAVGNRQADRVARQAAMAEVLTLATEPDNTSHITAGKRTADGSEFEKRTADGSEFESPKKKAKVE

SEQ ID NO: 7308 - protein, 2173 aa, synthetic construct
MPAAKRVKLDGGDKKYSIGLDIGTNSVGWAVITDEYKVPSKKFKVLGNTDRHSIKKNLIGALLFDSGETAEATRLKRTARRRYTRRKNRICYLQEIFSNEMAKVDDSFFHRLEESFLVEEDKKHERHPIFGNIVDEVAYHEKYPTIYHLRKKLVDSTDKADLRLIYLALAHMIKFRGHFLIEGDLNPDNSDVDKLFIQLVQTYNQLFEENPINASGVDAKAILSARLSKSRRLENLIAQLPGEKKNGLFGNLIALSLGLTPNFKSNFDLAEDAKLQLSKDTYDDDLDNLLAQIGDQYADLFLAAKNLSDAILLSDILRVNTEITKAPLSASMIKRYDEHHQDLTLLKALVRQQLPEKYKEIFFDQSKNGYAGYIDGGASQEEFYKFIKPILEKMDGTEELLVKLNREDLLRKQRTFDNGSIPHQIHLGELHAILRRQEDFYPFLKDNREKIEKILTFRIPYYVGPLARGNSRFAWMTRKSEETITPWNFEEVVDKGASAQSFIERMTNFDKNLPNEKVLPKHSLLYEYFTVYNELTKVKYVTEGMRKPAFLSGEQKKAIVDLLFKTNRKVTVKQLKEDYFKKIECFDSVEISGVEDRFNASLGTYHDLLKIIKDKDFLDNEENEDILEDIVLTLTLFEDREMIEERLKTYAHLFDDKVMKQLKRRRYTGWGRLSRKLINGIRDKQSGKTILDFLKSDGFANRNFMQLIHDDSLTFKEDIQKAQVSGQGDSLHEHIANLAGSPAIKKGILQTVKVVDELVKVMGRHKPENIVIEMARENQTTQKGQKNSRERMKRIEEGIKELGSQILKEHPVENTQLQNEKLYLYYLQNGRDMYVDQELDINRLSDYDVDHIVPQSFLKDDSIDNKVLTRSDKARGKSDNVPSEEVVKKMKNYWRQLLNAKLITQRKFDNLTKAERGGLSELDKAGFIKRQLVETRQITKHVAQILDSRMNTKYDENDKLIREVKVITLKSKLVSDFRKDFQFYKVREINNYHHAHDAYLNAVVGTALIKKYPKLESEFVYGDYKVYDVRKMIAKSEQEIGKATAKYFFYSNIMNFFKTEITLANGEIRKRPLIETNGETGEIVWDKGRDFATVRKVLSMPQVNIVKKTEVQTGGFSKESILPKRNSDKLIARKKDWDPKKYGGFDSPTVAYSVLVVAKVEKGKSKKLKSVKELLGITIMERSSFEKNPIDFLEAKGYKEVKKDLIIKLPKYSLFELENGRKRMLASAGELQKGNELALPSKYVNFLYLASHYEKLKGSPEDNEQKQLFVEQHKHYLDEIIEQISEFSKRVILADANLDKVLSAYNKHRDKPIREQAENIIHLFTLTNLGAPAAFKYFDTTIDRKRYTSTKEVLDATLIHQSITGLYETRIDLSQLGGDGGGSSEAAAKGGGGGMDLLKPLTVERKGVKIKGYWNSQADITCVPKDLLQGEEPVRQQNVTTIHGTQEGDVYYVNLKIDGRRINTEVIGTTLDYAIITPGDVPWILKKPLELTIKLDLEEQQGTLLNNSILSKKGKEELKQLFEKYSALWQSWENQVGHRRIRPHKIATGTVKPTPQKQYHINPKAKPDIQIVINDLLKQGVLIQKESTMNTPVYPVPKPNGRWRMVLDYRAVNKVTPLIAVQNQHSYGILGSLFKGRYKTTIDLSNGFWAHPIVPEDYWITAFTWQGKQYCWTVLPQGFLNSPGLFNGDVVDLLQGIPNVEVYVDDVYISHDSEKEHLEYLDILFNRLKEAGYIISLKKSNIANSIVDFLGFQITNEGRGLTDTFKEKLENITAPTTLKQLQSILGKLNFARNFIPDFTELIAPLYALIPKSPKNYVPWQIEHSTTLETLITKLNGAEYLQGRKGDKTLIMKVNASYTTGYIRYYNEGEKKPISYVSIVFSKTELKFTELEKLLTTVHKGLLKALDLSMGQNIHVYSPIVSMQNIQKTPQTAKKALASRWLSWLSYLEDPRIRFFYDPQMPALKDLPAVDTGKDNKKHPSNFQHIFYTDGSAITSPTKEGHLNAGMGIVYFINKDGNLQKQQEWSISLGNHTAQFAEIAAFEFALKKCLPLGGNILVVTDSNYVAKAYNEELDVWASNGFVNNRKKPLKHISKWKSVADLKRLRPDVVVTHEPGHQKLDSSPHAYGNNLADQLATQASFKVHAGKRTADGSEFEKRTADGSEFESPKKKAKVE

SEQ ID NO: 7309 - protein, 2095 aa, synthetic construct
MPAAKRVKLDGGDKKYSIGLDIGTNSVGWAVITDEYKVPSKKFKVLGNTDRHSIKKNLIGALLFDSGETAEATRLKRTARRRYTRRKNRICYLQEIFSNEMAKVDDSFFHRLEESFLVEEDKKHERHPIFGNIVDEVAYHEKYPTIYHLRKKLVDSTDKADLRLIYLALAHMIKFRGHFLIEGDLNPDNSDVDKLFIQLVQTYNQLFEENPINASGVDAKAILSARLSKSRRLENLIAQLPGEKKNGLFGNLIALSLGLTPNFKSNFDLAEDAKLQLSKDTYDDDLDNLLAQIGDQYADLFLAAKNLSDAILLSDILRVNTEITKAPLSASMIKRYDEHHQDLTLLKALVRQQLPEKYKEIFFDQSKNGYAGYIDGGASQEEFYKFIKPILEKMDGTEELLVKLNREDLLRKQRTFDNGSIPHQIHLGELHAILRRQEDFYPFLKDNREKIEKILTFRIPYYVGPLARGNSRFAWMTRKSEETITPWNFEEVVDKGASAQSFIERMTNFDKNLPNEKVLPKHSLLYEYFTVYNELTKVKYVTEGMRKPAFLSGEQKKAIVDLLFKTNRKVTVKQLKEDYFKKIECFDSVEISGVEDRFNASLGTYHDLLKIIKDKDFLDNEENEDILEDIVLTLTLFEDREMIEERLKTYAHLFDDKVMKQLKRRRYTGWGRLSRKLINGIRDKQSGKTILDFLKSDGFANRNFMQLIHDDSLTFKEDIQKAQVSGQGDSLHEHIANLAGSPAIKKGILQTVKVVDELVKVMGRHKPENIVIEMARENQTTQKGQKNSRERMKRIEEGIKELGSQILKEHPVENTQLQNEKLYLYYLQNGRDMYVDQELDINRLSDYDVDHIVPQSFLKDDSIDNKVLTRSDKARGKSDNVPSEEVVKKMKNYWRQLLNAKLITQRKFDNLTKAERGGLSELDKAGFIKRQLVETRQITKHVAQILDSRMNTKYDENDKLIREVKVITLKSKLVSDFRKDFQFYKVREINNYHHAHDAYLNAVVGTALIKKYPKLESEFVYGDYKVYDVRKMIAKSEQEIGKATAKYFFYSNIMNFFKTEITLANGEIRKRPLIETNGETGEIVWDKGRDFATVRKVLSMPQVNIVKKTEVQTGGFSKESILPKRNSDKLIARKKDWDPKKYGGFDSPTVAYSVLVVAKVEKGKSKKLKSVKELLGITIMERSSFEKNPIDFLEAKGYKEVKKDLIIKLPKYSLFELENGRKRMLASAGELQKGNELALPSKYVNFLYLASHYEKLKGSPEDNEQKQLFVEQHKHYLDEIIEQISEFSKRVILADANLDKVLSAYNKHRDKPIREQAENIIHLFTLTNLGAPAAFKYFDTTIDRKRYTSTKEVLDATLIHQSITGLYETRIDLSQLGGDGGGSSEAAAKGGGGGTLQLEEEYRLFEPESTQKQEMDIWLKNFPQAWAETGGMGTAHCQAPVLIQLKATATPISIRQYPMPHEAYQGIKPHIRRMLDQGILKPCQSPWNTPLLPVKKPGTEDYRPVQDLREVNKRVEDIHPTVPNPYNLLSTLPPSHPWYTVLDLKDAFFCLRLHSESQLLFAFEWRDPEIGLSGQLTWTRLPQGFKNSPTLFNEALHSDLADFRVRYPALVLLQYVDDLLLAAATRTECLEGTKALLETLGNKGYRASAKKAQICLQEVTYLGYSLKDGQRWLTKARKEAILSIPVPKNSRQVREFLGKAGYCRLFIPGFAELAAPLYPLTRPGTLFQWGTEQQLAFEDIKKALLSSPALGLPDITKPFELFIDENSGFAKGVLVQKLGPWKRPVAYLSKKLDTVASGWPPCLRMVAAIAILVKDAGKLTLGQPLTILTSHPVEALVRQPPNKWLSNARMTHYQAMLLDAERVHFGPTVSLNPATLLPLPSGGNHHDCLQILAETHGTRPDLTDQPLPDADLTWYTDGSSFIRNGEREAGAAVTTESEVIWAAPLPPGTSAQRAELIALTQALKMAEGKKLTVYTDSRYAFATTHVHGEIYRRRGWLTSEGKEIKNKNEILALLEALFLPKRLSIIHCPGHQKGDSPQAKGNRLADDTAKKAATETHSSLTVLPAGKRTADGSEFEKRTADGSEFESPKKKAKVE

SEQ ID NO: 7310 - protein, 2094 aa, synthetic construct
MPAAKRVKLDGGDKKYSIGLDIGTNSVGWAVITDEYKVPSKKFKVLGNTDRHSIKKNLIGALLFDSGETAEATRLKRTARRRYTRRKNRICYLQEIFSNEMAKVDDSFFHRLEESFLVEEDKKHERHPIFGNIVDEVAYHEKYPTIYHLRKKLVDSTDKADLRLIYLALAHMIKFRGHFLIEGDLNPDNSDVDKLFIQLVQTYNQLFEENPINASGVDAKAILSARLSKSRRLENLIAQLPGEKKNGLFGNLIALSLGLTPNFKSNFDLAEDAKLQLSKDTYDDDLDNLLAQIGDQYADLFLAAKNLSDAILLSDILRVNTEITKAPLSASMIKRYDEHHQDLTLLKALVRQQLPEKYKEIFFDQSKNGYAGYIDGGASQEEFYKFIKPILEKMDGTEELLVKLNREDLLRKQRTFDNGSIPHQIHLGELHAILRRQEDFYPFLKDNREKIEKILTFRIPYYVGPLARGNSRFAWMTRKSEETITPWNFEEVVDKGASAQSFIERMTNFDKNLPNEKVLPKHSLLYEYFTVYNELTKVKYVTEGMRKPAFLSGEQKKAIVDLLFKTNRKVTVKQLKEDYFKKIECFDSVEISGVEDRFNASLGTYHDLLKIIKDKDFLDNEENEDILEDIVLTLTLFEDREMIEERLKTYAHLFDDKVMKQLKRRRYTGWGRLSRKLINGIRDKQSGKTILDFLKSDGFANRNFMQLIHDDSLTFKEDIQKAQVSGQGDSLHEHIANLAGSPAIKKGILQTVKVVDELVKVMGRHKPENIVIEMARENQTTQKGQKNSRERMKRIEEGIKELGSQILKEHPVENTQLQNEKLYLYYLQNGRDMYVDQELDINRLSDYDVDHIVPQSFLKDDSIDNKVLTRSDKARGKSDNVPSEEVVKKMKNYWRQLLNAKLITQRKFDNLTKAERGGLSELDKAGFIKRQLVETRQITKHVAQILDSRMNTKYDENDKLIREVKVITLKSKLVSDFRKDFQFYKVREINNYHHAHDAYLNAVVGTALIKKYPKLESEFVYGDYKVYDVRKMIAKSEQEIGKATAKYFFYSNIMNFFKTEITLANGEIRKRPLIETNGETGEIVWDKGRDFATVRKVLSMPQVNIVKKTEVQTGGFSKESILPKRNSDKLIARKKDWDPKKYGGFDSPTVAYSVLVVAKVEKGKSKKLKSVKELLGITIMERSSFEKNPIDFLEAKGYKEVKKDLIIKLPKYSLFELENGRKRMLASAGELQKGNELALPSKYVNFLYLASHYEKLKGSPEDNEQKQLFVEQHKHYLDEIIEQISEFSKRVILADANLDKVLSAYNKHRDKPIREQAENIIHLFTLTNLGAPAAFKYFDTTIDRKRYTSTKEVLDATLIHQSITGLYETRIDLSQLGGDGGGSSEAAAKGGGGGVLNLEEEYRLHEKPVPSSIDPSWLQLFPTVWAERAGMGLANQVPPVVVELRSGASPVAVRQYPMSKEAREGIRPHIQKFLDLGVLVPCRSPWNTPLLPVKKPGTNDYRPVQDLREINKRVQDIHPTVPNPYNLLSSLPPSYTWYSVLDLKDAFFCLRLHPNSQPLFAFEWKDPEKGNTGQLTWTRLPQGFKNSPTLFNEALHRDLAPFRALNPQVVLLQYVDDLLVAAPTYEDCKKGTQKLLQELSKLGYRVSAKKAQLCQREVTYLGYLLKEGKRWLTPARKATVMKIPVPTTPRQVREFLGKAGFCRLFIPGFASLAAPLYPLTKPSIPFIWTEEHQQAFDHIKKALLSAPALALPDLTKPFTLYIDERAGVARGVLTQTLGPWRRPVAYLSKKLDPVASGWPTCLKAVAAVALLLKDADKLTLGQNVTVIASHSLESIVRQPPDRWMTNARMTHYQSLLLNERVSFAPPAVLNPATLLPVESEATPVHRCSEILAEETGTRRDLEDQPLPGVPTWYTDGSSFITEGKRRAGAPIVDGKRTVWASSLPEGTSAQKAELVALTQALRLAEGKNINIYTDSRYAFATAHIHGAIYKQRGWLTSAGKDIKNKEEILALLEAIHLPRRVAIIHCPGHQRGSNPVATGNRRADEAAKQAALSTRVLAGTTKPAGKRTADGSEFEKRTADGSEFESPKKKAKVE

SEQ ID NO: 7311 - protein, 2218 aa, synthetic construct
MPAAKRVKLDGGDKKYSIGLDIGTNSVGWAVITDEYKVPSKKFKVLGNTDRHSIKKNLIGALLFDSGETAEATRLKRTARRRYTRRKNRICYLQEIFSNEMAKVDDSFFHRLEESFLVEEDKKHERHPIFGNIVDEVAYHEKYPTIYHLRKKLVDSTDKADLRLIYLALAHMIKFRGHFLIEGDLNPDNSDVDKLFIQLVQTYNQLFEENPINASGVDAKAILSARLSKSRRLENLIAQLPGEKKNGLFGNLIALSLGLTPNFKSNFDLAEDAKLQLSKDTYDDDLDNLLAQIGDQYADLFLAAKNLSDAILLSDILRVNTEITKAPLSASMIKRYDEHHQDLTLLKALVRQQLPEKYKEIFFDQSKNGYAGYIDGGASQEEFYKFIKPILEKMDGTEELLVKLNREDLLRKQRTFDNGSIPHQIHLGELHAILRRQEDFYPFLKDNREKIEKILTFRIPYYVGPLARGNSRFAWMTRKSEETITPWNFEEVVDKGASAQSFIERMTNFDKNLPNEKVLPKHSLLYEYFTVYNELTKVKYVTEGMRKPAFLSGEQKKAIVDLLFKTNRKVTVKQLKEDYFKKIECFDSVEISGVEDRFNASLGTYHDLLKIIKDKDFLDNEENEDILEDIVLTLTLFEDREMIEERLKTYAHLFDDKVMKQLKRRRYTGWGRLSRKLINGIRDKQSGKTILDFLKSDGFANRNFMQLIHDDSLTFKEDIQKAQVSGQGDSLHEHIANLAGSPAIKKGILQTVKVVDELVKVMGRHKPENIVIEMARENQTTQKGQKNSRERMKRIEEGIKELGSQILKEHPVENTQLQNEKLYLYYLQNGRDMYVDQELDINRLSDYDVDHIVPQSFLKDDSIDNKVLTRSDKARGKSDNVPSEEVVKKMKNYWRQLLNAKLITQRKFDNLTKAERGGLSELDKAGFIKRQLVETRQITKHVAQILDSRMNTKYDENDKLIREVKVITLKSKLVSDFRKDFQFYKVREINNYHHAHDAYLNAVVGTALIKKYPKLESEFVYGDYKVYDVRKMIAKSEQEIGKATAKYFFYSNIMNFFKTEITLANGEIRKRPLIETNGETGEIVWDKGRDFATVRKVLSMPQVNIVKKTEVQTGGFSKESILPKRNSDKLIARKKDWDPKKYGGFDSPTVAYSVLVVAKVEKGKSKKLKSVKELLGITIMERSSFEKNPIDFLEAKGYKEVKKDLIIKLPKYSLFELENGRKRMLASAGELQKGNELALPSKYVNFLYLASHYEKLKGSPEDNEQKQLFVEQHKHYLDEIIEQISEFSKRVILADANLDKVLSAYNKHRDKPIREQAENIIHLFTLTNLGAPAAFKYFDTTIDRKRYTSTKEVLDATLIHQSITGLYETRIDLSQLGGDGGGSSEAAAKGGGGGTLGDQGSRGSDPLPEPRVTLTVEGIPTEFLVNTGAEHSVLTKPMGKMGSKRTVVAGATGSKVYPWTTKRLLKIGQKQVTHSFLVIPECPAPLLGRDLLTKLKAQIQFSTEGPQVTWEDRPAMCLVLNLEEEYRLHEKPVPPSIDPSWLQLFPMVWAEKAGMGLANQVPPVVVELKSDASPVAVRQYPMSKEAREGIRPHIQRFLDLGILVPCQSPWNTPLLPVKKPGTNDYRPVQDLREVNKRVQDIHPTVPNPYNLLSSLPPSHTWYSVLDLKDAFFCLKLHPNSQPLFAFEWRDPEKGNTGQLTWTRLPQGFKNSPTLFNEALHRDLASFRALNPQVVMLQYVDDLLVAAPTYRDCKEGTRRLLQELSKLGYRVSAKKAQLCREEVTYLGYLLKGGKRWLTPARKATVMKIPTPTTPRQVREFLGTAGFCRLWIPGFASLAAPLYPLTRPKVPFTWTEAHQEAFGRIKEALLSAPALALPDLTKPFALYVDEKEGVARGVLTQTLGPWRRPVAYLSKKLDPVASGWPTCLKAIAAVALLLKDADKLTLGQNVLVIAPHNLESIVRQPPDRWMTNARMTHYQSLLLNERVSFAPPAILNPATLLPVESDDTPIHICSEILAEETGTRPDLRDQPLPGVPAWYTDGSSFIMDGRRQAGAAIVDNKRTVWASNLPEGTSAQKAELIALTQALRLAEGKSINIYTDSRYAFATAHVHGAIYKQRGWLTSAGKDIKNKEEILALLEAIHLPKRVAIIHCPGHQRGTDPVATGNRKADEAAKQAAQSTRILTETTKNAGKRTADGSEFEKRTADGSEFESPKKKAKVE

SEQ ID NO: 7312 - protein, 2096 aa, synthetic construct
MPAAKRVKLDGGDKKYSIGLDIGTNSVGWAVITDEYKVPSKKFKVLGNTDRHSIKKNLIGALLFDSGETAEATRLKRTARRRYTRRKNRICYLQEIFSNEMAKVDDSFFHRLEESFLVEEDKKHERHPIFGNIVDEVAYHEKYPTIYHLRKKLVDSTDKADLRLIYLALAHMIKFRGHFLIEGDLNPDNSDVDKLFIQLVQTYNQLFEENPINASGVDAKAILSARLSKSRRLENLIAQLPGEKKNGLFGNLIALSLGLTPNFKSNFDLAEDAKLQLSKDTYDDDLDNLLAQIGDQYADLFLAAKNLSDAILLSDILRVNTEITKAPLSASMIKRYDEHHQDLTLLKALVRQQLPEKYKEIFFDQSKNGYAGYIDGGASQEEFYKFIKPILEKMDGTEELLVKLNREDLLRKQRTFDNGSIPHQIHLGELHAILRRQEDFYPFLKDNREKIEKILTFRIPYYVGPLARGNSRFAWMTRKSEETITPWNFEEVVDKGASAQSFIERMTNFDKNLPNEKVLPKHSLLYEYFTVYNELTKVKYVTEGMRKPAFLSGEQKKAIVDLLFKTNRKVTVKQLKEDYFKKIECFDSVEISGVEDRFNASLGTYHDLLKIIKDKDFLDNEENEDILEDIVLTLTLFEDREMIEERLKTYAHLFDDKVMKQLKRRRYTGWGRLSRKLINGIRDKQSGKTILDFLKSDGFANRNFMQLIHDDSLTFKEDIQKAQVSGQGDSLHEHIANLAGSPAIKKGILQTVKVVDELVKVMGRHKPENIVIEMARENQTTQKGQKNSRERMKRIEEGIKELGSQILKEHPVENTQLQNEKLYLYYLQNGRDMYVDQELDINRLSDYDVDHIVPQSFLKDDSIDNKVLTRSDKARGKSDNVPSEEVVKKMKNYWRQLLNAKLITQRKFDNLTKAERGGLSELDKAGFIKRQLVETRQITKHVAQILDSRMNTKYDENDKLIREVKVITLKSKLVSDFRKDFQFYKVREINNYHHAHDAYLNAVVGTALIKKYPKLESEFVYGDYKVYDVRKMIAKSEQEIGKATAKYFFYSNIMNFFKTEITLANGEIRKRPLIETNGETGEIVWDKGRDFATVRKVLSMPQVNIVKKTEVQTGGFSKESILPKRNSDKLIARKKDWDPKKYGGFDSPTVAYSVLVVAKVEKGKSKKLKSVKELLGITIMERSSFEKNPIDFLEAKGYKEVKKDLIIKLPKYSLFELENGRKRMLASAGELQKGNELALPSKYVNFLYLASHYEKLKGSPEDNEQKQLFVEQHKHYLDEIIEQISEFSKRVILADANLDKVLSAYNKHRDKPIREQAENIIHLFTLTNLGAPAAFKYFDTTIDRKRYTSTKEVLDATLIHQSITGLYETRIDLSQLGGDGGGSSEAAAKGGGGGLGIEDEYRLHETSTEPDVSLGSTWLSDFPQAWAETGGMGLAVRQAPLIIPLKATSTPVSIQQYPMSHEARLGIKPHIQRLLDQGILVPCQSPWNTPLLPVKKPGTNDYRPVQDLREVNKRVEDIHPTVPNPYNLLSGLPPSHQWYTVLDLKDAFFCLRLHPTSQPLFAFEWRDPGMGISGQLTWTRLPQGFKNSPTLFNEALHRDLADFRIQHPDLILLQYVDDILLAATSELDCQQGTRALLQTLGDLGYRASAKKAQICQKQVKYLGYLLREGQRWLTEARKETVMGQPVPKTPRQLREFLGKAGFCRLFIPGFAEMAAPLYPLTKPGTLFSWGPDQQKAYQEIKQALLTAPALGLPDLTKPFELFVDEKQGYAKGVLTQKLGPWRRPVAYLSKKLDPVAAGWPPCLRMVAAIAVLTKDAGKLTMGQPLVILAPHAVEALVKQPPDRWLSNARMTHYQAMLLDTDRVQFGPVVALNPATLLPLPEEGAPHDCLEILAETHGTRPDLTDQPIPDADHTWYTDGSSFLQEGQRKAGAAVTTETEVIWAGALPAGTSAQRAELIALTQALKMAEGKRLNVYTDSRYAFATAHIHGEIYRRRGWLTSEGREIKNKSEILALLKALFLPKRLSIIHCLGHQKGDSAEARGNRLADQAAREAAIKTPPDTSTLLIAGKRTADGSEFEKRTADGSEFESPKKKAKVE

SEQ ID NO: 7313 - protein, 2116 aa, synthetic construct
MPAAKRVKLDGGDKKYSIGLDIGTNSVGWAVITDEYKVPSKKFKVLGNTDRHSIKKNLIGALLFDSGETAEATRLKRTARRRYTRRKNRICYLQEIFSNEMAKVDDSFFHRLEESFLVEEDKKHERHPIFGNIVDEVAYHEKYPTIYHLRKKLVDSTDKADLRLIYLALAHMIKFRGHFLIEGDLNPDNSDVDKLFIQLVQTYNQLFEENPINASGVDAKAILSARLSKSRRLENLIAQLPGEKKNGLFGNLIALSLGLTPNFKSNFDLAEDAKLQLSKDTYDDDLDNLLAQIGDQYADLFLAAKNLSDAILLSDILRVNTEITKAPLSASMIKRYDEHHQDLTLLKALVRQQLPEKYKEIFFDQSKNGYAGYIDGGASQEEFYKFIKPILEKMDGTEELLVKLNREDLLRKQRTFDNGSIPHQIHLGELHAILRRQEDFYPFLKDNREKIEKILTFRIPYYVGPLARGNSRFAWMTRKSEETITPWNFEEVVDKGASAQSFIERMTNFDKNLPNEKVLPKHSLLYEYFTVYNELTKVKYVTEGMRKPAFLSGEQKKAIVDLLFKTNRKVTVKQLKEDYFKKIECFDSVEISGVEDRFNASLGTYHDLLKIIKDKDFLDNEENEDILEDIVLTLTLFEDREMIEERLKTYAHLFDDKVMKQLKRRRYTGWGRLSRKLINGIRDKQSGKTILDFLKSDGFANRNFMQLIHDDSLTFKEDIQKAQVSGQGDSLHEHIANLAGSPAIKKGILQTVKVVDELVKVMGRHKPENIVIEMARENQTTQKGQKNSRERMKRIEEGIKELGSQILKEHPVENTQLQNEKLYLYYLQNGRDMYVDQELDINRLSDYDVDHIVPQSFLKDDSIDNKVLTRSDKARGKSDNVPSEEVVKKMKNYWRQLLNAKLITQRKFDNLTKAERGGLSELDKAGFIKRQLVETRQITKHVAQILDSRMNTKYDENDKLIREVKVITLKSKLVSDFRKDFQFYKVREINNYHHAHDAYLNAVVGTALIKKYPKLESEFVYGDYKVYDVRKMIAKSEQEIGKATAKYFFYSNIMNFFKTEITLANGEIRKRPLIETNGETGEIVWDKGRDFATVRKVLSMPQVNIVKKTEVQTGGFSKESILPKRNSDKLIARKKDWDPKKYGGFDSPTVAYSVLVVAKVEKGKSKKLKSVKELLGITIMERSSFEKNPIDFLEAKGYKEVKKDLIIKLPKYSLFELENGRKRMLASAGELQKGNELALPSKYVNFLYLASHYEKLKGSPEDNEQKQLFVEQHKHYLDEIIEQISEFSKRVILADANLDKVLSAYNKHRDKPIREQAENIIHLFTLTNLGAPAAFKYFDTTIDRKRYTSTKEVLDATLIHQSITGLYETRIDLSQLGGDGGGSSEAAAKGGGGGTLNIEDEYRLHETSKEPDVSLGSTWLSDFPQAWAETGGMGLAVRQAPLIIPLKATSTPVSIKQYPMSQEARLGIKPHIQRLLDQGILVPCQSPWNTPLLPVKKPGTNDYRPVQDLREVNKRVEDIHPTVPNPYNLLSGLPPSHQWYTVLDLKDAFFCLRLHPTSQPLFAFEWRDPEMGISGQLTWTRLPQGFKNSPTLFNEALHRDLADFRIQHPDLILLQYVDDLLLAATSELDCQQGTRALLQTLGNLGYRASAKKAQICQKQVKYLGYLLKEGQRWLTEARKETVMGQPTPKTPRQLREFLGKAGFCRLFIPGFAEMAAPLYPLTKPGTLFNWGPDQQKAYQEIKQALLTAPALGLPDLTKPFELFVDEKQGYAKGVLTQKLGPWRRPVAYLSKKLDPVAAGWPPCLRMVAAIAVLTKDAGKLTMGQPLVILAPHAVEALVKQPPDRWLSNARMTHYQALLLDTDRVQFGPVVALNPATLLPLPEEGLQHNCLDILAEAHGTRPDLTDQPLPDADHTWYTDGSSLLQEGQRKAGAAVTTETEVIWAKALPAGTSAQRAELIALTQALKMAEGKKLNVYTDSRYAFATAHIHGEIYRRRGWLTSEGKEIKNKDEILALLKALFLPKRLSIIHCPGHQKGHSAEARGNRMADQAARKAAITETPDTSTLLIENSSPSGGSKRTADGSEFEAGKRTADGSEFEKRTADGSEFESPKKKAKVE

SEQ ID NO: 7314 - protein, 2116 aa, synthetic construct; identical to SEQ ID NO: 7313

SEQ ID NO: 7315 - protein, 2087 aa, synthetic construct
MPAAKRVKLDGGDKKYSIGLDIGTNSVGWAVITDEYKVPSKKFKVLGNTDRHSIKKNLIGALLFDSGETAEATRLKRTARRRYTRRKNRICYLQEIFSNEMAKVDDSFFHRLEESFLVEEDKKHERHPIFGNIVDEVAYHEKYPTIYHLRKKLVDSTDKADLRLIYLALAHMIKFRGHFLIEGDLNPDNSDVDKLFIQLVQTYNQLFEENPINASGVDAKAILSARLSKSRRLENLIAQLPGEKKNGLFGNLIALSLGLTPNFKSNFDLAEDAKLQLSKDTYDDDLDNLLAQIGDQYADLFLAAKNLSDAILLSDILRVNTEITKAPLSASMIKRYDEHHQDLTLLKALVRQQLPEKYKEIFFDQSKNGYAGYIDGGASQEEFYKFIKPILEKMDGTEELLVKLNREDLLRKQRTFDNGSIPHQIHLGELHAILRRQEDFYPFLKDNREKIEKILTFRIPYYVGPLARGNSRFAWMTRKSEETITPWNFEEVVDKGASAQSFIERMTNFDKNLPNEKVLPKHSLLYEYFTVYNELTKVKYVTEGMRKPAFLSGEQKKAIVDLLFKTNRKVTVKQLKEDYFKKIECFDSVEISGVEDRFNASLGTYHDLLKIIKDKDFLDNEENEDILEDIVLTLTLFEDREMIEERLKTYAHLFDDKVMKQLKRRRYTGWGRLSRKLINGIRDKQSGKTILDFLKSDGFANRNFMQLIHDDSLTFKEDIQKAQVSGQGDSLHEHIANLAGSPAIKKGILQTVKVVDELVKVMGRHKPENIVIEMARENQTTQKGQKNSRERMKRIEEGIKELGSQILKEHPVENTQLQNEKLYLYYLQNGRDMYVDQELDINRLSDYDVDHIVPQSFLKDDSIDNKVLTRSDKARGKSDNVPSEEVVKKMKNYWRQLLNAKLITQRKFDNLTKAERGGLSELDKAGFIKRQLVETRQITKHVAQILDSRMNTKYDENDKLIREVKVITLKSKLVSDFRKDFQFYKVREINNYHHAHDAYLNAVVGTALIKKYPKLESEFVYGDYKVYDVRKMIAKSEQEIGKATAKYFFYSNIMNFFKTEITLANGEIRKRPLIETNGETGEIVWDKGRDFATVRKVLSMPQVNIVKKTEVQTGGFSKESILPKRNSDKLIARKKDWDPKKYGGFDSPTVAYSVLVVAKVEKGKSKKLKSVKELLGITIMERSSFEKNPIDFLEAKGYKEVKKDLIIKLPKYSLFELENGRKRMLASAGELQKGNELALPSKYVNFLYLASHYEKLKGSPEDNEQKQLFVEQHKHYLDEIIEQISEFSKRVILADANLDKVLSAYNKHRDKPIREQAENIIHLFTLTNLGAPAAFKYFDTTIDRKRYTSTKEVLDATLIHQSITGLYETRIDLSQLGGDGGGSSEAAAKGGGGGIPWLMKKPLQLTTLVPLQEYEERLLKQTMLTGSYKEKLQSLFLKYDALWQHWENQVGHRRIKPHHIATGTVNPRPQKQYPINPKAKASIQTVINDLLKQGVLIQQNSIMNTPVYPVPKPDGKWRMVLDYREVNKTIPLIAAQNQHSAGILSSIFRGKYKTTLDLSNGFWAHSITPESYWLTAFTWLGQQYCWTRLPQGFLNSPALFNADVVDLLKEVPNVQVYVDDIYISHDDPREHLEQLEKVFSLLLNAGYVVSLKKSEIAQHEVEFLGFNITKEGRGLTETFKQKLLNITPPRDLKQLQSILGLLNFARNFIPNFSELVKPLYNIIATAPGKYITWTTDNSQQLQNIISMLNSAENLEERNPEVRLIMKVNTSPSAGYIRFYNEFAKRPIMYLNYVYTKAEVKFTNTEKLLTTIHKGLIKALDLGMGQEILVYSPIVSMTKIQKTPLPERKALPIRWITWMSYLEDPRIQFHYDKTLPELQQVPTVTDDIIAKIKHPSEFSMVFYTDGSAIKHPNVNKSHNAGMGIAQVQFKPEFTVINTWSIPLGDHTAQLAEVAAVEFACKKALKIDGPVLIVTDSFYVAESVNKELPYWQSNGFFNNKKKPLKHVSKWKSIADCIQLKPDIIIIHEKGHQPTASTFHTEGNNLADKLATQGSYVVNAGKRTADGSEFEKRTADGSEFESPKKKAKVE

SEQ ID NO: 7316 - protein, 2096 aa, synthetic construct
MPAAKRVKLDGGDKKYSIGLDIGTNSVGWAVITDEYKVPSKKFKVLGNTDRHSIKKNLIGALLFDSGETAEATRLKRTARRRYTRRKNRICYLQEIFSNEMAKVDDSFFHRLEESFLVEEDKKHERHPIFGNIVDEVAYHEKYPTIYHLRKKLVDSTDKADLRLIYLALAHMIKFRGHFLIEGDLNPDNSDVDKLFIQLVQTYNQLFEENPINASGVDAKAILSARLSKSRRLENLIAQLPGEKKNGLFGNLIALSLGLTPNFKSNFDLAEDAKLQLSKDTYDDDLDNLLAQIGDQYADLFLAAKNLSDAILLSDILRVNTEITKAPLSASMIKRYDEHHQDLTLLKALVRQQLPEKYKEIFFDQSKNGYAGYIDGGASQEEFYKFIKPILEKMDGTEELLVKLNREDLLRKQRTFDNGSIPHQIHLGELHAILRRQEDFYPFLKDNREKIEKILTFRIPYYVGPLARGNSRFAWMTRKSEETITPWNFEEVVDKGASAQSFIERMTNFDKNLPNEKVLPKHSLLYEYFTVYNELTKVKYVTEGMRKPAFLSGEQKKAIVDLLFKTNRKVTVKQLKEDYFKKIECFDSVEISGVEDRFNASLGTYHDLLKIIKDKDFLDNEENEDILEDIVLTLTLFEDREMIEERLKTYAHLFDDKVMKQLKRRRYTGWGRLSRKLINGIRDKQSGKTILDFLKSDGFANRNFMQLIHDDSLTFKEDIQKAQVSGQGDSLHEHIANLAGSPAIKKGILQTVKVVDELVKVMGRHKPENIVIEMARENQTTQKGQKNSRERMKRIEEGIKELGSQILKEHPVENTQLQNEKLYLYYLQNGRDMYVDQELDINRLSDYDVDHIVPQSFLKDDSIDNKVLTRSDKARGKSDNVPSEEVVKKMKNYWRQLLNAKLITQRKFDNLTKAERGGLSELDKAGFIKRQLVETRQITKHVAQILDSRMNTKYDENDKLIREVKVITLKSKLVSDFRKDFQFYKVREINNYHHAHDAYLNAVVGTALIKKYPKLESEFVYGDYKVYDVRKMIAKSEQEIGKATAKYFFYSNIMNFFKTEITLANGEIRKRPLIETNGETGEIVWDKGRDFATVRKVLSMPQVNIVKKTEVQTGGFSKESILPKRNSDKLIARKKDWDPKKYGGFDSPTVAYSVLVVAKVEKGKSKKLKSVKELLGITIMERSSFEKNPIDFLEAKGYKEVKKDLIIKLPKYSLFELENGRKRMLASAGELQKGNELALPSKYVNFLYLASHYEKLKGSPEDNEQKQLFVEQHKHYLDEIIEQISEFSKRVILADANLDKVLSAYNKHRDKPIREQAENIIHLFTLTNLGAPAAFKYFDTTIDRKRYTSTKEVLDATLIHQSITGLYETRIDLSQLGGDGGGSSEAAAKGGGGGTLNIEDEYRLHETSKEPDVPLGSTWLSDFPQAWAETGGMGLAVRQAPLIIPLKATSTPVSIKQYPMSQEARLGIKPHIQRLLDQGILVPCQSPWNTPLLPVKKPGTNDYRPVQDLREVNKRVEDIHPTVPNPYNLLSGLPPSHQWYTVLDLKDAFFCLRLHPTSQPLFAFEWRDPEMGISGQLTWTRLPQGFKNSPTLFNEALHRDLADFRIQHPDLILLQYVDDLLLAATSEQDCQRGTRALLQTLGNLGYRASAKKAQICQKQVKYLGYLLKEGQRWLTEARKETVMGQPTPKTPRQLREFLGTAGFCRLWIPGFAEMAAPLYPLTKPGTLFNWGPDQQKAYQEIKQALLTAPALGLPDLTKPFELFVDEKQGYAKGVLTQKLGPWRRPVAYLSKKLDPVAAGWPPCLRMVAAIAVLTKDAGKLTMGQPLVILAPHAVEALVKQPPDRWLSNARMTHYQAMLLDTDRVQFGPVVALNPATLLPLPEKEAPHDCLEILAETHGTRPDLTDQPIPDADYTWYTDGSSFLQEGQRRAGAAVTTETEVIWARALPAGTSAQRAELIALTQALKMAEGKKLNVYTDSRYAFATAHVHGEIYRRRGWLTSEGREIKNKNEILALLKALFLPKRLSIIHCPGHQKGNSAEARGNRMADQAAREAAMKAVLETSTLLAGKRTADGSEFEKRTADGSEFESPKKKAKVE

SEQ ID NO: 7317 - protein, 2096 aa, synthetic construct
MPAAKRVKLDGGDKKYSIGLDIGTNSVGWAVITDEYKVPSKKFKVLGNTDRHSIKKNLIGALLFDSGETAEATRLKRTARRRYTRRKNRICYLQEIFSNEMAKVDDSFFHRLEESFLVEEDKKHERHPIFGNIVDEVAYHEKYPTIYHLRKKLVDSTDKADLRLIYLALAHMIKFRGHFLIEGDLNPDNSDVDKLFIQLVQTYNQLFEENPINASGVDAKAILSARLSKSRRLENLIAQLPGEKKNGLFGNLIALSLGLTPNFKSNFDLAEDAKLQLSKDTYDDDLDNLLAQIGDQYADLFLAAKNLSDAILLSDILRVNTEITKAPLSASMIKRYDEHHQDLTLLKALVRQQLPEKYKEIFFDQSKNGYAGYIDGGASQEEFYKFIKPILEKMDGTEELLVKLNREDLLRKQRTFDNGSIPHQIHLGELHAILRRQEDFYPFLKDNREKIEKILTFRIPYYVGPLARGNSRFAWMTRKSEETITPWNFEEVVDKGASAQSFIERMTNFDKNLPNEKVLPKHSLLYEYFTVYNELTKVKYVTEGMRKPAFLSGEQKKAIVDLLFKTNRKVTVKQLKEDYFKKIECFDSVEISGVEDRFNASLGTYHDLLKIIKDKDFLDNEENEDILEDIVLTLTLFEDREMIEERLKTYAHLFDDKVMKQLKRRRYTGWGRLSRKLINGIRDKQSGKTILDFLKSDGFANRNFMQLIHDDSLTFKEDIQKAQVSGQGDSLHEHIANLAGSPAIKKGILQTVKVVDELVKVMGRHKPENIVIEMARENQTTQKGQKNSRERMKRIEEGIKELGSQILKEHPVENTQLQNEKLYLYYLQNGRDMYVDQELDINRLSDYDVDHIVPQSFLKDDSIDNKVLTRSDKARGKSDNVPSEEVVKKMKNYWRQLLNAKLITQRKFDNLTKAERGGLSELDKAGFIKRQLVETRQITKHVAQILDSRMNTKYDENDKLIREVKVITLKSKLVSDFRKDFQFYKVREINNYHHAHDAYLNAVVGTALIKKYPKLESEFVYGDYKVYDVRKMIAKSEQEIGKATAKYFFYSNIMNFFKTEITLANGEIRKRPLIETNGETGEIVWDKGRDFATVRKVLSMPQVNIVKKTEVQTGGFSKESILPKRNSDKLIARKKDWDPKKYGGFDSPTVAYSVLVVAKVEKGKSKKLKSVKELLGITIMERSSFEKNPIDFLEAKGYKEVKKDLIIKLPKYSLFELENGRKRMLASAGELQKGNELALPSKYVNFLYLASHYEKLKGSPEDNEQKQLFVEQHKHYLDEIIEQISEFSKRVILADANLDKVLSAYNKHRDKPIREQAENIIHLFTLTNLGAPAAFKYFDTTIDRKRYTSTKEVLDATLIHQSITGLYETRIDLSQLGGDGGGSSEAAAKGGGGGTLNIEDEYRLHETSKEPDVPLGSTWLSDFPQAWAETGGMGLAVRQAPLIIPLKATSTPVSIKQYPMSQEARLGIKPHIQRLLDQGILVPCQSPWNTPLLPVKKPGTNDYRPVQDLREVNKRVEDIHPTVPNPYNLLSGLPPSHQWYTVLDLKDAFFCLRLHPTSQPLFAFEWRDPEMGISGQLTWTRLPQGFKNSPTLFNEALHRDLADFRIQHPDLILLQYVDDLLLAATSEQDCQRGTRALLQTLGNLGYRASAKKAQICQKQVKYLGYLLKEGQRWLTEARKETVMGQPTPKTPRQLREFLGKAGFCRLFIPGFAEMAAPLYPLTKPGTLFNWGPDQQKAYQEIKQALLTAPALGLPDLTKPFELFVDEKQGYAKGVLTQKLGPWRRPVAYLSKKLDPVAAGWPPCLRMVAAIAVLTKDAGKLTMGQPLVILAPHAVEALVKQPPDRWLSNARMTHYQAMLLDTDRVQFGPVVALNPATLLPLPEKEAPHDCLEILAETHGTRPDLTDQPIPDADYTWYTDGSSFLQEGQRRAGAAVTTETEVIWARALPAGTSAQRAELIALTQALKMAEGKKLNVYTDSRYAFATAHVHGEIYRRRGWLTSEGREIKNKNEILALLKALFLPKRLSIIHCPGHQKGNSAEARGNRMADQAAREAAMKAVLETSTLLAGKRTADGSEFEKRTADGSEFESPKKKAKVE

SEQ ID NO: 7318 - protein, 2098 aa, synthetic construct
MPAAKRVKLDGGDKKYSIGLDIGTNSVGWAVITDEYKVPSKKFKVLGNTDRHSIKKNLIGALLFDSGETAEATRLKRTARRRYTRRKNRICYLQEIFSNEMAKVDDSFFHRLEESFLVEEDKKHERHPIFGNIVDEVAYHEKYPTIYHLRKKLVDSTDKADLRLIYLALAHMIKFRGHFLIEGDLNPDNSDVDKLFIQLVQTYNQLFEENPINASGVDAKAILSARLSKSRRLENLIAQLPGEKKNGLFGNLIALSLGLTPNFKSNFDLAEDAKLQLSKDTYDDDLDNLLAQIGDQYADLFLAAKNLSDAILLSDILRVNTEITKAPLSASMIKRYDEHHQDLTLLKALVRQQLPEKYKEIFFDQSKNGYAGYIDGGASQEEFYKFIKPILEKMDGTEELLVKLNREDLLRKQRTFDNGSIPHQIHLGELHAILRRQEDFYPFLKDNREKIEKILTFRIPYYVGPLARGNSRFAWMTRKSEETITPWNFEEVVDKGASAQSFIERMTNFDKNLPNEKVLPKHSLLYEYFTVYNELTKVKYVTEGMRKPAFLSGEQKKAIVDLLFKTNRKVTVKQLKEDYFKKIECFDSVEISGVEDRFNASLGTYHDLLKIIKDKDFLDNEENEDILEDIVLTLTLFEDREMIEERLKTYAHLFDDKVMKQLKRRRYTGWGRLSRKLINGIRDKQSGKTILDFLKSDGFANRNFMQLIHDDSLTFKEDIQKAQVSGQGDSLHEHIANLAGSPAIKKGILQTVKVVDELVKVMGRHKPENIVIEMARENQTTQKGQKNSRERMKRIEEGIKELGSQILKEHPVENTQLQNEKLYLYYLQNGRDMYVDQELDINRLSDYDVDHIVPQSFLKDDSIDNKVLTRSDKARGKSDNVPSEEVVKKMKNYWRQLLNAKLITQRKFDNLTKAERGGLSELDKAGFIKRQLVETRQITKHVAQILDSRMNTKYDENDKLIREVKVITLKSKLVSDFRKDFQFYKVREINNYHHAHDAYLNAVVGTALIKKYPKLESEFVYGDYKVYDVRKMIAKSEQEIGKATAKYFFYSNIMNFFKTEITLANGEIRKRPLIETNGETGEIVWDKGRDFATVRKVLSMPQVNIVKKTEVQTGGFSKESILPKRNSDKLIARKKDWDPKKYGGFDSPTVAYSVLVVAKVEKGKSKKLKSVKELLGITIMERSSFEKNPIDFLEAKGYKEVKKDLIIKLPKYSLFELENGRKRMLASAGELQKGNELALPSKYVNFLYLASHYEKLKGSPEDNEQKQLFVEQHKHYLDEIIEQISEFSKRVILADANLDKVLSAYNKHRDKPIREQAENIIHLFTLTNLGAPAAFKYFDTTIDRKRYTSTKEVLDATLIHQSITGLYETRIDLSQLGGDGGEAAAKGGGGSSGGTAPLEEEYRLFLEAPIQNVTLLEQWKREIPKVWAEINPPGLASTQAPIHVQLLSTALPVRVRQYPITLEAKRSLRETIRKFRAAGILRPVHSPWNTPLLPVRKSGTSEYRMVQDLREVNKRVETIHPTVPNPYTLLSLLPPDRIWYSVLDLKDAFFCIPLAPESQLIFAFEWADAEEGESGQLTWTRLPQGFKNSPTLFDEALNRDLQGFRLDHPSVSLLQYVDDLLIAADTQAACLSATRDLLMTLAELGYRVSGKKAQLCQEEVTYLGFKIHKGSRSLSNSRTQAILQIPVPKTKRQVREFLGTIGYCRLWIPGFAELAQPLYAATRGGNDPLVWGEKEEEAFQSLKLALTQPPALALPSLDKPFQLFVEETSGAAKGVLTQALGPWKRPVAYLSKRLDPVAAGWPRCLRAIAAAALLTREASKLTFGQDIEITSSHNLESLLRSPPDKWLTNARITQYQVLLLDPPRVRFKQTAALNPATLLPETDDTLPIHHCLDTLDSLTSTRPDLTDQPLAQAEATLFTDGSSYIRDGKRYAGAAVVTLDSVIWAEPLPIGTSAQKAELIALTKALEWSKDKSVNIYTDSRYAFATLHVHGMIYRERGLLTAGGKAIKNAPEILALLTAVWLPKRVAVMHCKGHQKDDAPTSTGNRRADEVAREVAIRPLSTQATISAGKRTADGSEFEKRTADGSEFESPKKKAKVE

SEQ ID NO: 7319 - protein, 2098 aa, synthetic construct
MPAAKRVKLDGGDKKYSIGLDIGTNSVGWAVITDEYKVPSKKFKVLGNTDRHSIKKNLIGALLFDSGETAEATRLKRTARRRYTRRKNRICYLQEIFSNEMAKVDDSFFHRLEESFLVEEDKKHERHPIFGNIVDEVAYHEKYPTIYHLRKKLVDSTDKADLRLIYLALAHMIKFRGHFLIEGDLNPDNSDVDKLFIQLVQTYNQLFEENPINASGVDAKAILSARLSKSRRLENLIAQLPGEKKNGLFGNLIALSLGLTPNFKSNFDLAEDAKLQLSKDTYDDDLDNLLAQIGDQYADLFLAAKNLSDAILLSDILRVNTEITKAPLSASMIKRYDEHHQDLTLLKALVRQQLPEKYKEIFFDQSKNGYAGYIDGGASQEEFYKFIKPILEKMDGTEELLVKLNREDLLRKQRTFDNGSIPHQIHLGELHAILRRQEDFYPFLKDNREKIEKILTFRIPYYVGPLARGNSRFAWMTRKSEETITPWNFEEVVDKGASAQSFIERMTNFDKNLPNEKVLPKHSLLYEYFTVYNELTKVKYVTEGMRKPAFLSGEQKKAIVDLLFKTNRKVTVKQLKEDYFKKIECFDSVEISGVEDRFNASLGTYHDLLKIIKDKDFLDNEENEDILEDIVLTLTLFEDREMIEERLKTYAHLFDDKVMKQLKRRRYTGWGRLSRKLINGIRDKQSGKTILDFLKSDGFANRNFMQLIHDDSLTFKEDIQKAQVSGQGDSLHEHIANLAGSPAIKKGILQTVKVVDELVKVMGRHKPENIVIEMARENQTTQKGQKNSRERMKRIEEGIKELGSQILKEHPVENTQLQNEKLYLYYLQNGRDMYVDQELDINRLSDYDVDHIVPQSFLKDDSIDNKVLTRSDKARGKSDNVPSEEVVKKMKNYWRQLLNAKLITQRKFDNLTKAERGGLSELDKAGFIKRQLVETRQITKHVAQILDSRMNTKYDENDKLIREVKVITLKSKLVSDFRKDFQFYKVREINNYHHAHDAYLNAVVGTALIKKYPKLESEFVYGDYKVYDVRKMIAKSEQEIGKATAKYFFYSNIMNFFKTEITLANGEIRKRPLIETNGETGEIVWDKGRDFATVRKVLSMPQVNIVKKTEVQTGGFSKESILPKRNSDKLIARKKDWDPKKYGGFDSPTVAYSVLVVAKVEKGKSKKLKSVKELLGITIMERSSFEKNPIDFLEAKGYKEVKKDLIIKLPKYSLFELENGRKRMLASAGELQKGNELALPSKYVNFLYLASHYEKLKGSPEDNEQKQLFVEQHKHYLDEIIEQISEFSKRVILADANLDKVLSAYNKHRDKPIREQAENIIHLFTLTNLGAPAAFKYFDTTIDRKRYTSTKEVLDATLIHQSITGLYETRIDLSQLGGDGGEAAAKGGGGSSGGTAPLEEEYRLFLEAPIQNVTLLEQWKREIPKVWAEINPPGLASTQAPIHVQLLSTALPVRVRQYPITLEAKRSLRETIRKFRAAGILRPVHSPWNTPLLPVRKSGTSEYRMVQDLREVNKRVETIHPTVPNPYTLLSLLPPDRIWYSVLDLKDAFFCIPLAPESQLIFAFEWADAEEGESGQLTWTRLPQGFKNSPTLFNEALNRDLQGFRLDHPSVSLLQYVDDLLIAADTQAACLSATRDLLMTLAELGYRVSGKKAQLCQEEVTYLGFKIHKGSRSLSNSRTQAILQIPVPKTKRQVREFLGTIGYCRLWIPGFAELAQPLYAATRPGNDPLVWGEKEEEAFQSLKLALTQPPALALPSLDKPFQLFVEETSGAAKGVLTQALGPWKRPVAYLSKRLDPVAAGWPRCLRAIAAAALLTREASKLTFGQDIEITSSHNLESLLRSPPDKWLTNARITQYQVLLLDPPRVRFKQTAALNPATLLPETDDTLPIHHCLDTLDSLTSTRPDLTDQPLAQAEATLFTDGSSYIRDGKRYAGAAVVTLDSVIWAEPLPIGTSAQKAELIALTKALEWSKDKSVNIYTDSRYAFATLHVHGMIYRERGWLTAGGKAIKNAPEILALLTAVWLPKRVAVMHCKGHQKDDAPTSTGNRRADEVAREVAIRPLSTQATISAGKRTADGSEFEKRTADGSEFESPKKKAKVE

SEQ ID NO: 7320 - protein, 2098 aa, synthetic construct
MPAAKRVKLDGGDKKYSIGLDIGTNSVGWAVITDEYKVPSKKFKVLGNTDRHSIKKNLIGALLFDSGETAEATRLKRTARRRYTRRKNRICYLQEIFSNEMAKVDDSFFHRLEESFLVEEDKKHERHPIFGNIVDEVAYHEKYPTIYHLRKKLVDSTDKADLRLIYLALAHMIKFRGHFLIEGDLNPDNSDVDKLFIQLVQTYNQLFEENPINASGVDAKAILSARLSKSRRLENLIAQLPGEKKNGLFGNLIALSLGLTPNFKSNFDLAEDAKLQLSKDTYDDDLDNLLAQIGDQYADLFLAAKNLSDAILLSDILRVNTEITKAPLSASMIKRYDEHHQDLTLLKALVRQQLPEKYKEIFFDQSKNGYAGYIDGGASQEEFYKFIKPILEKMDGTEELLVKLNREDLLRKQRTFDNGSIPHQIHLGELHAILRRQEDFYPFLKDNREKIEKILTFRIPYYVGPLARGNSRFAWMTRKSEETITPWNFEEVVDKGASAQSFIERMTNFDKNLPNEKVLPKHSLLYEYFTVYNELTKVKYVTEGMRKPAFLSGEQKKAIVDLLFKTNRKVTVKQLKEDYFKKIECFDSVEISGVEDRFNASLGTYHDLLKIIKDKDFLDNEENEDILEDIVLTLTLFEDREMIEERLKTYAHLFDDKVMKQLKRRRYTGWGRLSRKLINGIRDKQSGKTILDFLKSDGFANRNFMQLIHDDSLTFKEDIQKAQVSGQGDSLHEHIANLAGSPAIKKGILQTVKVVDELVKVMGRHKPENIVIEMARENQTTQKGQKNSRERMKRIEEGIKELGSQILKEHPVENTQLQNEKLYLYYLQNGRDMYVDQELDINRLSDYDVDHIVPQSFLKDDSIDNKVLTRSDKARGKSDNVPSEEVVKKMKNYWRQLLNAKLITQRKFDNLTKAERGGLSELDKAGFIKRQLVETRQITKHVAQILDSRMNTKYDENDKLIREVKVITLKSKLVSDFRKDFQFYKVREINNYHHAHDAYLNAVVGTALIKKYPKLESEFVYGDYKVYDVRKMIAKSEQEIGKATAKYFFYSNIMNFFKTEITLANGEIRKRPLIETNGETGEIVWDKGRDFATVRKVLSMPQVNIVKKTEVQTGGFSKESILPKRNSDKLIARKKDWDPKKYGGFDSPTVAYSVLVVAKVEKGKSKKLKSVKELLGITIMERSSFEKNPIDFLEAKGYKEVKKDLIIKLPKYSLFELENGRKRMLASAGELQKGNELALPSKYVNFLYLASHYEKLKGSPEDNEQKQLFVEQHKHYLDEIIEQISEFSKRVILADANLDKVLSAYNKHRDKPIREQAENIIHLFTLTNLGAPAAFKYFDTTIDRKRYTSTKEVLDATLIHQSITGLYETRIDLSQLGGDGGEAAAKGGGGSSGGTAPLEEEYRLFLEAPIQNVTLLEQWKREIPKVWAEINPPGLASTQAPIHVQLLSTALPVRVRQYPITLEAKRSLRETIRKFRAAGILRPVHSPWNTPLLPVRKSGTSEYRMVQDLREVNKRVETIHPTVPNPYTLLSLLPPDRIWYSVLDLKDAFFCIPLAPESQLIFAFEWADAEEGESGQLTWTRLPQGFKNSPTLFNEALNRDLQGFRLDHPSVSLLQYVDDLLIAADTQAACLSATRDLLMTLAELGYRVSGKKAQLCQEEVTYLGFKIHKGSRSLSNSRTQAILQIPVPKTKRQVREFLGKIGYCRLFIPGFAELAQPLYAATRPGNDPLVWGEKEEEAFQSLKLALTQPPALALPSLDKPFQLFVEETSGAAKGVLTQALGPWKRPVAYLSKRLDPVAAGWPRCLRAIAAAALLTREASKLTFGQDIEITSSHNLESLLRSPPDKWLTNARITQYQVLLLDPPRVRFKQTAALNPATLLPETDDTLPIHHCLDTLDSLTSTRPDLTDQPLAQAEATLFTDGSSYIRDGKRYAGAAVVTLDSVIWAEPLPIGTSAQKAELIALTKALEWSKDKSVNIYTDSRYAFATLHVHGMIYRERGWLTAGGKAIKNAPEILALLTAVWLPKRVAVMHCKGHQKDDAPTSTGNRRADEVAREVAIRPLSTQATISAGKRTADGSEFEKRTADGSEFESPKKKAKVE

SEQ ID NO: 7321 - protein, 2102 aa, synthetic construct
MPAAKRVKLDGGDKKYSIGLDIGTNSVGWAVITDEYKVPSKKFKVLGNTDRHSIKKNLIGALLFDSGETAEATRLKRTARRRYTRRKNRICYLQEIFSNEMAKVDDSFFHRLEESFLVEEDKKHERHPIFGNIVDEVAYHEKYPTIYHLRKKLVDSTDKADLRLIYLALAHMIKFRGHFLIEGDLNPDNSDVDKLFIQLVQTYNQLFEENPINASGVDAKAILSARLSKSRRLENLIAQLPGEKKNGLFGNLIALSLGLTPNFKSNFDLAEDAKLQLSKDTYDDDLDNLLAQIGDQYADLFLAAKNLSDAILLSDILRVNTEITKAPLSASMIKRYDEHHQDLTLLKALVRQQLPEKYKEIFFDQSKNGYAGYIDGGASQEEFYKFIKPILEKMDGTEELLVKLNREDLLRKQRTFDNGSIPHQIHLGELHAILRRQEDFYPFLKDNREKIEKILTFRIPYYVGPLARGNSRFAWMTRKSEETITPWNFEEVVDKGASAQSFIERMTNFDKNLPNEKVLPKHSLLYEYFTVYNELTKVKYVTEGMRKPAFLSGEQKKAIVDLLFKTNRKVTVKQLKEDYFKKIECFDSVEISGVEDRFNASLGTYHDLLKIIKDKDFLDNEENEDILEDIVLTLTLFEDREMIEERLKTYAHLFDDKVMKQLKRRRYTGWGRLSRKLINGIRDKQSGKTILDFLKSDGFANRNFMQLIHDDSLTFKEDIQKAQVSGQGDSLHEHIANLAGSPAIKKGILQTVKVVDELVKVMGRHKPENIVIEMARENQTTQKGQKNSRERMKRIEEGIKELGSQILKEHPVENTQLQNEKLYLYYLQNGRDMYVDQELDINRLSDYDVDHIVPQSFLKDDSIDNKVLTRSDKARGKSDNVPSEEVVKKMKNYWRQLLNAKLITQRKFDNLTKAERGGLSELDKAGFIKRQLVETRQITKHVAQILDSRMNTKYDENDKLIREVKVITLKSKLVSDFRKDFQFYKVREINNYHHAHDAYLNAVVGTALIKKYPKLESEFVYGDYKVYDVRKMIAKSEQEIGKATAKYFFYSNIMNFFKTEITLANGEIRKRPLIETNGETGEIVWDKGRDFATVRKVLSMPQVNIVKKTEVQTGGFSKESILPKRNSDKLIARKKDWDPKKYGGFDSPTVAYSVLVVAKVEKGKSKKLKSVKELLGITIMERSSFEKNPIDFLEAKGYKEVKKDLIIKLPKYSLFELENGRKRMLASAGELQKGNELALPSKYVNFLYLASHYEKLKGSPEDNEQKQLFVEQHKHYLDEIIEQISEFSKRVILADANLDKVLSAYNKHRDKPIREQAENIIHLFTLTNLGAPAAFKYFDTTIDRKRYTSTKEVLDATLIHQSITGLYETRIDLSQLGGDGGEAAAKGGGGSSGGTVSLQDEHRLFDIPVTTSLPDVWLQDFPQAWAETGGLGRAKCQAPIIIDLKPTAVPVSIKQYPMSLEAHMGIRQHIIKFLELGVLRPCRSPWNTPLLPVKKPGTQDYRPVQDLREINKRTVDIHPTVPNPYNLLSTLKPDYSWYTVLDLKDAFFCLPLAPQSQELFAFEWKDPERGISGQLTWTRLPQGFKNSPTLFDEALHRDLTDFRTQHPEVTLLQYVDDLLLAAPTKKACTQGTRHLLQELGEKGYRASAKKAQICQTKVTYLGYILSEGKRWLTPGRIETVARIPPPRNPREVREFLGTAGFCRLWIPGFAELAAPLYALTKESTPFTWQTEHQLAFEALKKALLSAPALGLPDTSKPFTLFLDERQGIAKGVLTQKLGPWKRPVAYLSKKLDPVAAGWPPCLRIMAATAMLVKDSAKLTLGQPLTVITPHTLEAIVRQPPDRWITNARLTHYQALLLDTDRVQFGPPVTLNPATLLPVPENQPSPHDCRQVLAETHGTREDLKDQELPDADHTWYTDGSSYLDSGTRRAGAAVVDGHNTIWAQSLPPGTSAQKAELIALTKALELSKGKKANIYTDSRYAFATAHTHGSIYERRGLLTSEGKEIKNKAEIIALLKALFLPQEVAIIHCPGHQKGQDPVAVGNRQADRVARQAAMAEVLTLATEPDNTSHITAGKRTADGSEFEKRTADGSEFESPKKKAKVE

SEQ ID NO: 7322 - protein, 2087 aa, synthetic construct
MPAAKRVKLDGGDKKYSIGLDIGTNSVGWAVITDEYKVPSKKFKVLGNTDRHSIKKNLIGALLFDSGETAEATRLKRTARRRYTRRKNRICYLQEIFSNEMAKVDDSFFHRLEESFLVEEDKKHERHPIFGNIVDEVAYHEKYPTIYHLRKKLVDSTDKADLRLIYLALAHMIKFRGHFLIEGDLNPDNSDVDKLFIQLVQTYNQLFEENPINASGVDAKAILSARLSKSRRLENLIAQLPGEKKNGLFGNLIALSLGLTPNFKSNFDLAEDAKLQLSKDTYDDDLDNLLAQIGDQYADLFLAAKNLSDAILLSDILRVNTEITKAPLSASMIKRYDEHHQDLTLLKALVRQQLPEKYKEIFFDQSKNGYAGYIDGGASQEEFYKFIKPILEKMDGTEELLVKLNREDLLRKQRTFDNGSIPHQIHLGELHAILRRQEDFYPFLKDNREKIEKILTFRIPYYVGPLARGNSRFAWMTRKSEETITPWNFEEVVDKGASAQSFIERMTNFDKNLPNEKVLPKHSLLYEYFTVYNELTKVKYVTEGMRKPAFLSGEQKKAIVDLLFKTNRKVTVKQLKEDYFKKIECFDSVEISGVEDRFNASLGTYHDLLKIIKDKDFLDNEENEDILEDIVLTLTLFEDREMIEERLKTYAHLFDDKVMKQLKRRRYTGWGRLSRKLINGIRDKQSGKTILDFLKSDGFANRNFMQLIHDDSLTFKEDIQKAQVSGQGDSLHEHIANLAGSPAIKKGILQTVKVVDELVKVMGRHKPENIVIEMARENQTTQKGQKNSRERMKRIEEGIKELGSQILKEHPVENTQLQNEKLYLYYLQNGRDMYVDQELDINRLSDYDVDHIVPQSFLKDDSIDNKVLTRSDKARGKSDNVPSEEVVKKMKNYWRQLLNAKLITQRKFDNLTKAERGGLSELDKAGFIKRQLVETRQITKHVAQILDSRMNTKYDENDKLIREVKVITLKSKLVSDFRKDFQFYKVREINNYHHAHDAYLNAVVGTALIKKYPKLESEFVYGDYKVYDVRKMIAKSEQEIGKATAKYFFYSNIMNFFKTEITLANGEIRKRPLIETNGETGEIVWDKGRDFATVRKVLSMPQVNIVKKTEVQTGGFSKESILPKRNSDKLIARKKDWDPKKYGGFDSPTVAYSVLVVAKVEKGKSKKLKSVKELLGITIMERSSFEKNPIDFLEAKGYKEVKKDLIIKLPKYSLFELENGRKRMLASAGELQKGNELALPSKYVNFLYLASHYEKLKGSPEDNEQKQLFVEQHKHYLDEIIEQISEFSKRVILADANLDKVLSAYNKHRDKPIREQAENIIHLFTLTNLGAPAAFKYFDTTIDRKRYTSTKEVLDATLIHQSITGLYETRIDLSQLGGDGGEAAAKGGGGSSGGVPWILKKPLELTIKLDLEEQQGTLLNNSILSKKGKEELKQLFEKYSALWQSWENQVGHRRIRPHKIATGTVKPTPQKQYHINPKAKPDIQIVINDLLKQGVLIQKESTMNTPVYPVPKPNGRWRMVLDYRAVNKVTPLIAVQNQHSYGILGSLFKGRYKTTIDLSNGFWAHPIVPEDYWITAFTWQGKQYCWTVLPQGFLNSPGLFTGDVVDLLQGIPNVEVYVDDVYISHDSEKEHLEYLDILFNRLKEAGYIISLKKSNIANSIVDFLGFQITNEGRGLTDTFKEKLENITAPTTLKQLQSILGLLNFARNFIPDFTELIAPLYALIPKSTKNYVPWQIEHSTTLETLITKLNGAEYLQGRKGDKTLIMKVNASYTTGYIRYYNEGEKKPISYVSIVFSKTELKFTELEKLLTTVHKGLLKALDLSMGQNIHVYSPIVSMQNIQKTPQTAKKALASRWLSWLSYLEDPRIRFFYDPQMPALKDLPAVDTGKDNKKHPSNFQHIFYTDGSAITSPTKEGHLNAGMGIVYFINKDGNLQKQQEWSISLGNHTAQFAEIAAFEFALKKCLPLGGNILVVTDSNYVAKAYNEELDVWASNGFVNNRKKPLKHISKWKSVADLKRLRPDVVVTHEPGHQKLDSSPHAYGNNLADQLATQASFKVHAGKRTADGSEFEKRTADGSEFESPKKKAKVE

SEQ ID NO: 7323 - protein, 2095 aa, synthetic construct
MPAAKRVKLDGGDKKYSIGLDIGTNSVGWAVITDEYKVPSKKFKVLGNTDRHSIKKNLIGALLFDSGETAEATRLKRTARRRYTRRKNRICYLQEIFSNEMAKVDDSFFHRLEESFLVEEDKKHERHPIFGNIVDEVAYHEKYPTIYHLRKKLVDSTDKADLRLIYLALAHMIKFRGHFLIEGDLNPDNSDVDKLFIQLVQTYNQLFEENPINASGVDAKAILSARLSKSRRLENLIAQLPGEKKNGLFGNLIALSLGLTPNFKSNFDLAEDAKLQLSKDTYDDDLDNLLAQIGDQYADLFLAAKNLSDAILLSDILRVNTEITKAPLSASMIKRYDEHHQDLTLLKALVRQQLPEKYKEIFFDQSKNGYAGYIDGGASQEEFYKFIKPILEKMDGTEELLVKLNREDLLRKQRTFDNGSIPHQIHLGELHAILRRQEDFYPFLKDNREKIEKILTFRIPYYVGPLARGNSRFAWMTRKSEETITPWNFEEVVDKGASAQSFIERMTNFDKNLPNEKVLPKHSLLYEYFTVYNELTKVKYVTEGMRKPAFLSGEQKKAIVDLLFKTNRKVTVKQLKEDYFKKIECFDSVEISGVEDRFNASLGTYHDLLKIIKDKDFLDNEENEDILEDIVLTLTLFEDREMIEERLKTYAHLFDDKVMKQLKRRRYTGWGRLSRKLINGIRDKQSGKTILDFLKSDGFANRNFMQLIHDDSLTFKEDIQKAQVSGQGDSLHEHIANLAGSPAIKKGILQTVKVVDELVKVMGRHKPENIVIEMARENQTTQKGQKNSRERMKRIEEGIKELGSQILKEHPVENTQLQNEKLYLYYLQNGRDMYVDQELDINRLSDYDVDHIVPQSFLKDDSIDNKVLTRSDKARGKSDNVPSEEVVKKMKNYWRQLLNAKLITQRKFDNLTKAERGGLSELDKAGFIKRQLVETRQITKHVAQILDSRMNTKYDENDKLIREVKVITLKSKLVSDFRKDFQFYKVREINNYHHAHDAYLNAVVGTALIKKYPKLESEFVYGDYKVYDVRKMIAKSEQEIGKATAKYFFYSNIMNFFKTEITLANGEIRKRPLIETNGETGEIVWDKGRDFATVRKVLSMPQVNIVKKTEVQTGGFSKESILPKRNSDKLIARKKDWDPKKYGGFDSPTVAYSVLVVAKVEKGKSKKLKSVKELLGITIMERSSFEKNPIDFLEAKGYKEVKKDLIIKLPKYSLFELENGRKRMLASAGELQKGNELALPSKYVNFLYLASHYEKLKGSPEDNEQKQLFVEQHKHYLDEIIEQISEFSKRVILADANLDKVLSAYNKHRDKPIREQAENIIHLFTLTNLGAPAAFKYFDTTIDRKRYTSTKEVLDATLIHQSITGLYETRIDLSQLGGDGGEAAAKGGGGSSGGTLQLEEEYRLFEPESTQKQEMDIWLKNFPQAWAETGGMGTAHCQAPVLIQLKATATPISIRQYPMPHEAYQGIKPHIRRMLDQGILKPCQSPWNTPLLPVKKPGTEDYRPVQDLREVNKRVEDIHPTVPNPYNLLSTLPPSHPWYTVLDLKDAFFCLRLHSESQLLFAFEWRDPEIGLSGQLTWTRLPQGFKNSPTLFNEALHSDLADFRVRYPALVLLQYVDDLLLAAATRTECLEGTKALLETLGNKGYRASAKKAQICLQEVTYLGYSLKDGQRWLTKARKEAILSIPVPKNSRQVREFLGTAGYCRLWIPGFAELAAPLYPLTRPGTLFQWGTEQQLAFEDIKKALLSSPALGLPDITKPFELFIDENSGFAKGVLVQKLGPWKRPVAYLSKKLDTVASGWPPCLRMVAAIAILVKDAGKLTLGQPLTILTSHPVEALVRQPPNKWLSNARMTHYQAMLLDAERVHFGPTVSLNPATLLPLPSGGNHHDCLQILAETHGTRPDLTDQPLPDADLTWYTDGSSFIRNGEREAGAAVTTESEVIWAAPLPPGTSAQRAELIALTQALKMAEGKKLTVYTDSRYAFATTHVHGEIYRRRGWLTSEGKEIKNKNEILALLEALFLPKRLSIIHCPGHQKGDSPQAKGNRLADDTAKKAATETHSSLTVLPAGKRTADGSEFEKRTADGSEFESPKKKAKVE

SEQ ID NO: 7324 - protein, 2095 aa, synthetic construct
MPAAKRVKLDGGDKKYSIGLDIGTNSVGWAVITDEYKVPSKKFKVLGNTDRHSIKKNLIGALLFDSGETAEATRLKRTARRRYTRRKNRICYLQEIFSNEMAKVDDSFFHRLEESFLVEEDKKHERHPIFGNIVDEVAYHEKYPTIYHLRKKLVDSTDKADLRLIYLALAHMIKFRGHFLIEGDLNPDNSDVDKLFIQLVQTYNQLFEENPINASGVDAKAILSARLSKSRRLENLIAQLPGEKKNGLFGNLIALSLGLTPNFKSNFDLAEDAKLQLSKDTYDDDLDNLLAQIGDQYADLFLAAKNLSDAILLSDILRVNTEITKAPLSASMIKRYDEHHQDLTLLKALVRQQLPEKYKEIFFDQSKNGYAGYIDGGASQEEFYKFIKPILEKMDGTEELLVKLNREDLLRKQRTFDNGSIPHQIHLGELHAILRRQEDFYPFLKDNREKIEKILTFRIPYYVGPLARGNSRFAWMTRKSEETITPWNFEEVVDKGASAQSFIERMTNFDKNLPNEKVLPKHSLLYEYFTVYNELTKVKYVTEGMRKPAFLSGEQKKAIVDLLFKTNRKVTVKQLKEDYFKKIECFDSVEISGVEDRFNASLGTYHDLLKIIKDKDFLDNEENEDILEDIVLTLTLFEDREMIEERLKTYAHLFDDKVMKQLKRRRYTGWGRLSRKLINGIRDKQSGKTILDFLKSDGFANRNFMQLIHDDSLTFKEDIQKAQVSGQGDSLHEHIANLAGSPAIKKGILQTVKVVDELVKVMGRHKPENIVIEMARENQTTQKGQKNSRERMKRIEEGIKELGSQILKEHPVENTQLQNEKLYLYYLQNGRDMYVDQELDINRLSDYDVDHIVPQSFLKDDSIDNKVLTRSDKARGKSDNVPSEEVVKKMKNYWRQLLNAKLITQRKFDNLTKAERGGLSELDKAGFIKRQLVETRQITKHVAQILDSRMNTKYDENDKLIREVKVITLKSKLVSDFRKDFQFYKVREINNYHHAHDAYLNAVVGTALIKKYPKLESEFVYGDYKVYDVRKMIAKSEQEIGKATAKYFFYSNIMNFFKTEITLANGEIRKRPLIETNGETGEIVWDKGRDFATVRKVLSMPQVNIVKKTEVQTGGFSKESILPKRNSDKLIARKKDWDPKKYGGFDSPTVAYSVLVVAKVEKGKSKKLKSVKELLGITIMERSSFEKNPIDFLEAKGYKEVKKDLIIKLPKYSLFELENGRKRMLASAGELQKGNELALPSKYVNFLYLASHYEKLKGSPEDNEQKQLFVEQHKHYLDEIIEQISEFSKRVILADANLDKVLSAYNKHRDKPIREQAENIIHLFTLTNLGAPAAFKYFDTTIDRKRYTSTKEVLDATLIHQSITGLYETRIDLSQLGGDGGEAAAKGGGGSSGGTLQLEEEYRLFEPESTQKQEMDIWLKNFPQAWAETGGMGTAHCQAPVLIQLKATATPISIRQYPMPHEAYQGIKPHIRRMLDQGILKPCQSPWNTPLLPVKKPGTEDYRPVQDLREVNKRVEDIHPTVPNPYNLLSTLPPSHPWYTVLDLKDAFFCLRLHSESQLLFAFEWRDPEIGLSGQLTWTRLPQGFKNSPTLFNEALHSDLADFRVRYPALVLLQYVDDLLLAAATRTECLEGTKALLETLGNKGYRASAKKAQICLQEVTYLGYSLKDGQRWLTKARKEAILSIPVPKNSRQVREFLGKAGYCRLFIPGFAELAAPLYPLTRPGTLFQWGTEQQLAFEDIKKALLSSPALGLPDITKPFELFIDENSGFAKGVLVQKLGPWKRPVAYLSKKLDTVASGWPPCLRMVAAIAILVKDAGKLTLGQPLTILTSHPVEALVRQPPNKWLSNARMTHYQAMLLDAERVHFGPTVSLNPATLLPLPSGGNHHDCLQILAETHGTRPDLTDQPLPDADLTWYTDGSSFIRNGEREAGAAVTTESEVIWAAPLPPGTSAQRAELIALTQALKMAEGKKLTVYTDSRYAFATTHVHGEIYRRRGWLTSEGKEIKNKNEILALLEALFLPKRLSIIHCPGHQKGDSPQAKGNRLADDTAKKAATETHSSLTVLPAGKRTADGSEFEKRTADGSEFESPKKKAKVE

SEQ ID NO: 7325 - protein, 2176 aa, synthetic construct
MPAAKRVKLDGGDKKYSIGLDIGTNSVGWAVITDEYKVPSKKFKVLGNTDRHSIKKNLIGALLFDSGETAEATRLKRTARRRYTRRKNRICYLQEIFSNEMAKVDDSFFHRLEESFLVEEDKKHERHPIFGNIVDEVAYHEKYPTIYHLRKKLVDSTDKADLRLIYLALAHMIKFRGHFLIEGDLNPDNSDVDKLFIQLVQTYNQLFEENPINASGVDAKAILSARLSKSRRLENLIAQLPGEKKNGLFGNLIALSLGLTPNFKSNFDLAEDAKLQLSKDTYDDDLDNLLAQIGDQYADLFLAAKNLSDAILLSDILRVNTEITKAPLSASMIKRYDEHHQDLTLLKALVRQQLPEKYKEIFFDQSKNGYAGYIDGGASQEEFYKFIKPILEKMDGTEELLVKLNREDLLRKQRTFDNGSIPHQIHLGELHAILRRQEDFYPFLKDNREKIEKILTFRIPYYVGPLARGNSRFAWMTRKSEETITPWNFEEVVDKGASAQSFIERMTNFDKNLPNEKVLPKHSLLYEYFTVYNELTKVKYVTEGMRKPAFLSGEQKKAIVDLLFKTNRKVTVKQLKEDYFKKIECFDSVEISGVEDRFNASLGTYHDLLKIIKDKDFLDNEENEDILEDIVLTLTLFEDREMIEERLKTYAHLFDDKVMKQLKRRRYTGWGRLSRKLINGIRDKQSGKTILDFLKSDGFANRNFMQLIHDDSLTFKEDIQKAQVSGQGDSLHEHIANLAGSPAIKKGILQTVKVVDELVKVMGRHKPENIVIEMARENQTTQKGQKNSRERMKRIEEGIKELGSQILKEHPVENTQLQNEKLYLYYLQNGRDMYVDQELDINRLSDYDVDHIVPQSFLKDDSIDNKVLTRSDKARGKSDNVPSEEVVKKMKNYWRQLLNAKLITQRKFDNLTKAERGGLSELDKAGFIKRQLVETRQITKHVAQILDSRMNTKYDENDKLIREVKVITLKSKLVSDFRKDFQFYKVREINNYHHAHDAYLNAVVGTALIKKYPKLESEFVYGDYKVYDVRKMIAKSEQEIGKATAKYFFYSNIMNFFKTEITLANGEIRKRPLIETNGETGEIVWDKGRDFATVRKVLSMPQVNIVKKTEVQTGGFSKESILPKRNSDKLIARKKDWDPKKYGGFDSPTVAYSVLVVAKVEKGKSKKLKSVKELLGITIMERSSFEKNPIDFLEAKGYKEVKKDLIIKLPKYSLFELENGRKRMLASAGELQKGNELALPSKYVNFLYLASHYEKLKGSPEDNEQKQLFVEQHKHYLDEIIEQISEFSKRVILADANLDKVLSAYNKHRDKPIREQAENIIHLFTLTNLGAPAAFKYFDTTIDRKRYTSTKEVLDATLIHQSITGLYETRIDLSQLGGDGGEAAAKGGGGSSGGMNPLQLLQPLPAEIKGTKLLAHWNSGATITCIPESFLEDEQPIKKTLIKTIHGEKQQNVYYVTFKVKGRKVEAEVIASPYEYILLSPTDVPWLTQQPLQLTILVPLQEYQEKILSKTALPEDQKQQLKTLFVKYDNLWQHWENQVGHRKIRPHNIATGDYPPRPQKQYPINPKAKPSIQIVIDDLLKQGVLTPQNSTMNTPVYPVPKPDGRWRMVLDYREVNKTIPLTAAQNQHSAGILATIVRQKYKTTLDLANGFWAHPITPESYWLTAFTWQGKQYCWTRLPQGFLNSPALFTADVVDLLKEIPNVQVYVDDIYLSHDDPKEHVQQLEKVFQILLQAGYVVSLKKSEIGQKTVEFLGFNITKEGRGLTDTFKTKLLNITPPKDLKQLQSILGLLNFARNFIPNFAELVQPLYNLIASAKGKYIEWSEENTKQLNMVIEALNTASNLEERLPEQRLVIKVNTSPSAGYVRYYNETGKKPIMYLNYVFSKAELKFSMLEKLLTTMHKALIKAMDLAMGQEILVYSPIVSMTKIQKTPLPERKALPIRWITWMTYLEDPRIQFHYDKTLPELKHIPDVYTSSQSPVKHPSQYEGVFYTDGSAIKSPDPTKSNNAGMGIVHATYKPEYQVLNQWSIPLGNHTAQMAEIAAVEFACKKALKIPGPVLVITDSFYVAESANKELPYWKSNGFVNNKKKPLKHISKWKSIAECLSMKPDITIQHEKGISLQIPVFILKGNALADKLATQGSYVVNAGKRTADGSEFEKRTADGSEFESPKKKAKVE

SEQ ID NO: 7326 - protein, 2094 aa, synthetic construct
MPAAKRVKLDGGDKKYSIGLDIGTNSVGWAVITDEYKVPSKKFKVLGNTDRHSIKKNLIGALLFDSGETAEATRLKRTARRRYTRRKNRICYLQEIFSNEMAKVDDSFFHRLEESFLVEEDKKHERHPIFGNIVDEVAYHEKYPTIYHLRKKLVDSTDKADLRLIYLALAHMIKFRGHFLIEGDLNPDNSDVDKLFIQLVQTYNQLFEENPINASGVDAKAILSARLSKSRRLENLIAQLPGEKKNGLFGNLIALSLGLTPNFKSNFDLAEDAKLQLSKDTYDDDLDNLLAQIGDQYADLFLAAKNLSDAILLSDILRVNTEITKAPLSASMIKRYDEHHQDLTLLKALVRQQLPEKYKEIFFDQSKNGYAGYIDGGASQEEFYKFIKPILEKMDGTEELLVKLNREDLLRKQRTFDNGSIPHQIHLGELHAILRRQEDFYPFLKDNREKIEKILTFRIPYYVGPLARGNSRFAWMTRKSEETITPWNFEEVVDKGASAQSFIERMTNFDKNLPNEKVLPKHSLLYEYFTVYNELTKVKYVTEGMRKPAFLSGEQKKAIVDLLFKTNRKVTVKQLKEDYFKKIECFDSVEISGVEDRFNASLGTYHDLLKIIKDKDFLDNEENEDILEDIVLTLTLFEDREMIEERLKTYAHLFDDKVMKQLKRRRYTGWGRLSRKLINGIRDKQSGKTILDFLKSDGFANRNFMQLIHDDSLTFKEDIQKAQVSGQGDSLHEHIANLAGSPAIKKGILQTVKVVDELVKVMGRHKPENIVIEMARENQTTQKGQKNSRERMKRIEEGIKELGSQILKEHPVENTQLQNEKLYLYYLQNGRDMYVDQELDINRLSDYDVDHIVPQSFLKDDSIDNKVLTRSDKARGKSDNVPSEEVVKKMKNYWRQLLNAKLITQRKFDNLTKAERGGLSELDKAGFIKRQLVETRQITKHVAQILDSRMNTKYDENDKLIREVKVITLKSKLVSDFRKDFQFYKVREINNYHHAHDAYLNAVVGTALIKKYPKLESEFVYGDYKVYDVRKMIAKSEQEIGKATAKYFFYSNIMNFFKTEITLANGEIRKRPLIETNGETGEIVWDKGRDFATVRKVLSMPQVNIVKKTEVQTGGFSKESILPKRNSDKLIARKKDWDPKKYGGFDSPTVAYSVLVVAKVEKGKSKKLKSVKELLGITIMERSSFEKNPIDFLEAKGYKEVKKDLIIKLPKYSLFELENGRKRMLASAGELQKGNELALPSKYVNFLYLASHYEKLKGSPEDNEQKQLFVEQHKHYLDEIIEQISEFSKRVILADANLDKVLSAYNKHRDKPIREQAENIIHLFTLTNLGAPAAFKYFDTTIDRKRYTSTKEVLDATLIHQSITGLYETRIDLSQLGGDGGEAAAKGGGGSSGGVLNLEEEYRLHEKPVPSSIDPSWLQLFPTVWAERAGMGLANQVPPVVVELRSGASPVAVRQYPMSKEAREGIRPHIQKFLDLGVLVPCRSPWNTPLLPVKKPGTNDYRPVQDLREINKRVQDIHPTVPNPYNLLSSLPPSYTWYSVLDLKDAFFCLRLHPNSQPLFAFEWKDPEKGNTGQLTWTRLPQGFKNSPTLFNEALHRDLAPFRALNPQVVLLQYVDDLLVAAPTYEDCKKGTQKLLQELSKLGYRVSAKKAQLCQREVTYLGYLLKEGKRWLTPARKATVMKIPVPTTPRQVREFLGTAGFCRLWIPGFASLAAPLYPLTKPSIPFIWTEEHQQAFDHIKKALLSAPALALPDLTKPFTLYIDERAGVARGVLTQTLGPWRRPVAYLSKKLDPVASGWPTCLKAVAAVALLLKDADKLTLGQNVTVIASHSLESIVRQPPDRWMTNARMTHYQSLLLNERVSFAPPAVLNPATLLPVESEATPVHRCSEILAEETGTRRDLEDQPLPGVPTWYTDGSSFITEGKRRAGAPIVDGKRTVWASSLPEGTSAQKAELVALTQALRLAEGKNINIYTDSRYAFATAHIHGAIYKQRGWLTSAGKDIKNKEEILALLEAIHLPRRVAIIHCPGHQRGSNPVATGNRRADEAAKQAALSTRVLAGTTKPAGKRTADGSEFEKRTADGSEFESPKKKAKVE

SEQ ID NO: 7327 - protein, 2218 aa, synthetic construct
MPAAKRVKLDGGDKKYSIGLDIGTNSVGWAVITDEYKVPSKKFKVLGNTDRHSIKKNLIGALLFDSGETAEATRLKRTARRRYTRRKNRICYLQEIFSNEMAKVDDSFFHRLEESFLVEEDKKHERHPIFGNIVDEVAYHEKYPTIYHLRKKLVDSTDKADLRLIYLALAHMIKFRGHFLIEGDLNPDNSDVDKLFIQLVQTYNQLFEENPINASGVDAKAILSARLSKSRRLENLIAQLPGEKKNGLFGNLIALSLGLTPNFKSNFDLAEDAKLQLSKDTYDDDLDNLLAQIGDQYADLFLAAKNLSDAILLSDILRVNTEITKAPLSASMIKRYDEHHQDLTLLKALVRQQLPEKYKEIFFDQSKNGYAGYIDGGASQEEFYKFIKPILEKMDGTEELLVKLNREDLLRKQRTFDNGSIPHQIHLGELHAILRRQEDFYPFLKDNREKIEKILTFRIPYYVGPLARGNSRFAWMTRKSEETITPWNFEEVVDKGASAQSFIERMTNFDKNLPNEKVLPKHSLLYEYFTVYNELTKVKYVTEGMRKPAFLSGEQKKAIVDLLFKTNRKVTVKQLKEDYFKKIECFDSVEISGVEDRFNASLGTYHDLLKIIKDKDFLDNEENEDILEDIVLTLTLFEDREMIEERLKTYAHLFDDKVMKQLKRRRYTGWGRLSRKLINGIRDKQSGKTILDFLKSDGFANRNFMQLIHDDSLTFKEDIQKAQVSGQGDSLHEHIANLAGSPAIKKGILQTVKVVDELVKVMGRHKPENIVIEMARENQTTQKGQKNSRERMKRIEEGIKELGSQILKEHPVENTQLQNEKLYLYYLQNGRDMYVDQELDINRLSDYDVDHIVPQSFLKDDSIDNKVLTRSDKARGKSDNVPSEEVVKKMKNYWRQLLNAKLITQRKFDNLTKAERGGLSELDKAGFIKRQLVETRQITKHVAQILDSRMNTKYDENDKLIREVKVITLKSKLVSDFRKDFQFYKVREINNYHHAHDAYLNAVVGTALIKKYPKLESEFVYGDYKVYDVRKMIAKSEQEIGKATAKYFFYSNIMNFFKTEITLANGEIRKRPLIETNGETGEIVWDKGRDFATVRKVLSMPQVNIVKKTEVQTGGFSKESILPKRNSDKLIARKKDWDPKKYGGFDSPTVAYSVLVVAKVEKGKSKKLKSVKELLGITIMERSSFEKNPIDFLEAKGYKEVKKDLIIKLPKYSLFELENGRKRMLASAGELQKGNELALPSKYVNFLYLASHYEKLKGSPEDNEQKQLFVEQHKHYLDEIIEQISEFSKRVILADANLDKVLSAYNKHRDKPIREQAENIIHLFTLTNLGAPAAFKYFDTTIDRKRYTSTKEVLDATLIHQSITGLYETRIDLSQLGGDGGEAAAKGGGGSSGGTLGDQGSRGSDPLPEPRVTLTVEGIPTEFLVNTGAEHSVLTKPMGKMGSKRTVVAGATGSKVYPWTTKRLLKIGQKQVTHSFLVIPECPAPLLGRDLLTKLKAQIQFSTEGPQVTWEDRPAMCLVLNLEEEYRLHEKPVPPSIDPSWLQLFPMVWAEKAGMGLANQVPPVVVELKSDASPVAVRQYPMSKEAREGIRPHIQRFLDLGILVPCQSPWNTPLLPVKKPGTNDYRPVQDLREVNKRVQDIHPTVPNPYNLLSSLPPSHTWYSVLDLKDAFFCLKLHPNSQPLFAFEWRDPEKGNTGQLTWTRLPQGFKNSPTLFNEALHRDLASFRALNPQVVMLQYVDDLLVAAPTYRDCKEGTRRLLQELSKLGYRVSAKKAQLCREEVTYLGYLLKGGKRWLTPARKATVMKIPTPTTPRQVREFLGTAGFCRLWIPGFASLAAPLYPLTRPKVPFTWTEAHQEAFGRIKEALLSAPALALPDLTKPFALYVDEKEGVARGVLTQTLGPWRRPVAYLSKKLDPVASGWPTCLKAIAAVALLLKDADKLTLGQNVLVIAPHNLESIVRQPPDRWMTNARMTHYQSLLLNERVSFAPPAILNPATLLPVESDDTPIHICSEILAEETGTRPDLRDQPLPGVPAWYTDGSSFIMDGRRQAGAAIVDNKRTVWASNLPEGTSAQKAELIALTQALRLAEGKSINIYTDSRYAFATAHVHGAIYKQRGWLTSAGKDIKNKEEILALLEAIHLPKRVAIIHCPGHQRGTDPVATGNRKADEAAKQAAQSTRILTETTKNAGKRTADGSEFEKRTADGSEFESPKKKAKVE

SEQ ID NO: 7328 - protein, 2096 aa, synthetic construct
MPAAKRVKLDGGDKKYSIGLDIGTNSVGWAVITDEYKVPSKKFKVLGNTDRHSIKKNLIGALLFDSGETAEATRLKRTARRRYTRRKNRICYLQEIFSNEMAKVDDSFFHRLEESFLVEEDKKHERHPIFGNIVDEVAYHEKYPTIYHLRKKLVDSTDKADLRLIYLALAHMIKFRGHFLIEGDLNPDNSDVDKLFIQLVQTYNQLFEENPINASGVDAKAILSARLSKSRRLENLIAQLPGEKKNGLFGNLIALSLGLTPNFKSNFDLAEDAKLQLSKDTYDDDLDNLLAQIGDQYADLFLAAKNLSDAILLSDILRVNTEITKAPLSASMIKRYDEHHQDLTLLKALVRQQLPEKYKEIFFDQSKNGYAGYIDGGASQEEFYKFIKPILEKMDGTEELLVKLNREDLLRKQRTFDNGSIPHQIHLGELHAILRRQEDFYPFLKDNREKIEKILTFRIPYYVGPLARGNSRFAWMTRKSEETITPWNFEEVVDKGASAQSFIERMTNFDKNLPNEKVLPKHSLLYEYFTVYNELTKVKYVTEGMRKPAFLSGEQKKAIVDLLFKTNRKVTVKQLKEDYFKKIECFDSVEISGVEDRFNASLGTYHDLLKIIKDKDFLDNEENEDILEDIVLTLTLFEDREMIEERLKTYAHLFDDKVMKQLKRRRYTGWGRLSRKLINGIRDKQSGKTILDFLKSDGFANRNFMQLIHDDSLTFKEDIQKAQVSGQGDSLHEHIANLAGSPAIKKGILQTVKVVDELVKVMGRHKPENIVIEMARENQTTQKGQKNSRERMKRIEEGIKELGSQILKEHPVENTQLQNEKLYLYYLQNGRDMYVDQELDINRLSDYDVDHIVPQSFLKDDSIDNKVLTRSDKARGKSDNVPSEEVVKKMKNYWRQLLNAKLITQRKFDNLTKAERGGLSELDKAGFIKRQLVETRQITKHVAQILDSRMNTKYDENDKLIREVKVITLKSKLVSDFRKDFQFYKVREINNYHHAHDAYLNAVVGTALIKKYPKLESEFVYGDYKVYDVRKMIAKSEQEIGKATAKYFFYSNIMNFFKTEITLANGEIRKRPLIETNGETGEIVWDKGRDFATVRKVLSMPQVNIVKKTEVQTGGFSKESILPKRNSDKLIARKKDWDPKKYGGFDSPTVAYSVLVVAKVEKGKSKKLKSVKELLGITIMERSSFEKNPIDFLEAKGYKEVKKDLIIKLPKYSLFELENGRKRMLASAGELQKGNELALPSKYVNFLYLASHYEKLKGSPEDNEQKQLFVEQHKHYLDEIIEQISEFSKRVILADANLDKVLSAYNKHRDKPIREQAENIIHLFTLTNLGAPAAFKYFDTTIDRKRYTSTKEVLDATLIHQSITGLYETRIDLSQLGGDGGEAAAKGGGGSSGGTLGIEDEYRLHETSTEPDVSLGSTWLSDFPQAWAETGGMGLAVRQAPLIIPLKATSTPVSIQQYPMSHEARLGIKPHIQRLLDQGILVPCQSPWNTPLLPVKKPGTNDYRPVQDLREVNKRVEDIHPTVPNPYNLLSGLPPSHQWYTVLDLKDAFFCLRLHPTSQPLFAFEWRDPGMGISGQLTWTRLPQGFKNSPTLFNEALHRDLADFRIQHPDLILLQYVDDILLAATSELDCQQGTRALLQTLGDLGYRASAKKAQICQKQVKYLGYLLREGQRWLTEARKETVMGQPVPKTPRQLREFLGTAGFCRLWIPGFAEMAAPLYPLTKPGTLFSWGPDQQKAYQEIKQALLTAPALGLPDLTKPFELFVDEKQGYAKGVLTQKLGPWRRPVAYLSKKLDPVAAGWPPCLRMVAAIAVLTKDAGKLTMGQPLVILAPHAVEALVKQPPDRWLSNARMTHYQAMLLDTDRVQFGPVVALNPATLLPLPEEGAPHDCLEILAETHGTRPDLTDQPIPDADHTWYTDGSSFLQEGQRKAGAAVTTETEVIWAGALPAGTSAQRAELIALTQALKMAEGKRLNVYTDSRYAFATAHIHGEIYRRRGWLTSEGREIKNKSEILALLKALFLPKRLSIIHCLGHQKGDSAEARGNRLADQAAREAAIKTPPDTSTLLAGKRTADGSEFEKRTADGSEFESPKKKAKVE

SEQ ID NO: 7329 - protein, 2096 aa, synthetic construct
MPAAKRVKLDGGDKKYSIGLDIGTNSVGWAVITDEYKVPSKKFKVLGNTDRHSIKKNLIGALLFDSGETAEATRLKRTARRRYTRRKNRICYLQEIFSNEMAKVDDSFFHRLEESFLVEEDKKHERHPIFGNIVDEVAYHEKYPTIYHLRKKLVDSTDKADLRLIYLALAHMIKFRGHFLIEGDLNPDNSDVDKLFIQLVQTYNQLFEENPINASGVDAKAILSARLSKSRRLENLIAQLPGEKKNGLFGNLIALSLGLTPNFKSNFDLAEDAKLQLSKDTYDDDLDNLLAQIGDQYADLFLAAKNLSDAILLSDILRVNTEITKAPLSASMIKRYDEHHQDLTLLKALVRQQLPEKYKEIFFDQSKNGYAGYIDGGASQEEFYKFIKPILEKMDGTEELLVKLNREDLLRKQRTFDNGSIPHQIHLGELHAILRRQEDFYPFLKDNREKIEKILTFRIPYYVGPLARGNSRFAWMTRKSEETITPWNFEEVVDKGASAQSFIERMTNFDKNLPNEKVLPKHSLLYEYFTVYNELTKVKYVTEGMRKPAFLSGEQKKAIVDLLFKTNRKVTVKQLKEDYFKKIECFDSVEISGVEDRFNASLGTYHDLLKIIKDKDFLDNEENEDILEDIVLTLTLFEDREMIEERLKTYAHLFDDKVMKQLKRRRYTGWGRLSRKLINGIRDKQSGKTILDFLKSDGFANRNFMQLIHDDSLTFKEDIQKAQVSGQGDSLHEHIANLAGSPAIKKGILQTVKVVDELVKVMGRHKPENIVIEMARENQTTQKGQKNSRERMKRIEEGIKELGSQILKEHPVENTQLQNEKLYLYYLQNGRDMYVDQELDINRLSDYDVDHIVPQSFLKDDSIDNKVLTRSDKARGKSDNVPSEEVVKKMKNYWRQLLNAKLITQRKFDNLTKAERGGLSELDKAGFIKRQLVETRQITKHVAQILDSRMNTKYDENDKLIREVKVITLKSKLVSDFRKDFQFYKVREINNYHHAHDAYLNAVVGTALIKKYPKLESEFVYGDYKVYDVRKMIAKSEQEIGKATAKYFFYSNIMNFFKTEITLANGEIRKRPLIETNGETGEIVWDKGRDFATVRKVLSMPQVNIVKKTEVQTGGFSKESILPKRNSDKLIARKKDWDPKKYGGFDSPTVAYSVLVVAKVEKGKSKKLKSVKELLGITIMERSSFEKNPIDFLEAKGYKEVKKDLIIKLPKYSLFELENGRKRMLASAGELQKGNELALPSKYVNFLYLASHYEKLKGSPEDNEQKQLFVEQHKHYLDEIIEQISEFSKRVILADANLDKVLSAYNKHRDKPIREQAENIIHLFTLTNLGAPAAFKYFDTTIDRKRYTSTKEVLDATLIHQSITGLYETRIDLSQLGGDGGEAAAKGGGGSSGGTLNIEDEYRLHETSKGPDVPLGSTWLSDFPQAWAETGGMGLAVRQAPLIIPLKATSTPVSIKQYPMSQEARLGIKPHIQRLLDQGILVPCQSPWNTPLLPVKKPGTNDYRPVQDLREVNKRVEDIHPTVPNPYNLLSGLPPSHQWYTVLDLKDAFFCLRLHPTSQSLFAFEWRDPEMGISGQLTWTRLPQGFKNSPTLFNEALHRDLADFRIQHPDLILLQYVDDLLLAATSELDCQQGTRALLQTLGDLGYRASAKKAQICQKQVKYLGYLLKEGQRWLTEARKETVMGQPTPKTPRQLREFLGKAGFCRLFIPGFAEMAAPLYPLTKPGTLFEWGPDQQKAYQEIKQALLTAPALGLPDLTKPFELFVDEKQGYAKGVLTQKLGPWRRPVAYLSKKLDPVAAGWPPCLRMVAAIAVLTKDAGKLTMGQPLVILAPHAVEALVKQPPDRWLSNARMTHYQALLLDTDRVQFGPIVALNPATLLPLPEEGLQHDCLDILAEAHGTRPDLTDQPLPDADHTWYTDGSSFLQEGQRKAGAAVTTETEVVWAKALPAGTSAQRAELIALTQALKMAEGKKLNVYTDSRYAFATAHIHGEIYRRRGWLTSEGKEIKNKDEILALLKALFLPKRLSIIHCPGHQKGNRAEARGNRMADQAAREVATRETPETSTLLAGKRTADGSEFEKRTADGSEFESPKKKAKVE

SEQ ID NO: 7330 - protein, 2096 aa, synthetic construct
MPAAKRVKLDGGDKKYSIGLDIGTNSVGWAVITDEYKVPSKKFKVLGNTDRHSIKKNLIGALLFDSGETAEATRLKRTARRRYTRRKNRICYLQEIFSNEMAKVDDSFFHRLEESFLVEEDKKHERHPIFGNIVDEVAYHEKYPTIYHLRKKLVDSTDKADLRLIYLALAHMIKFRGHFLIEGDLNPDNSDVDKLFIQLVQTYNQLFEENPINASGVDAKAILSARLSKSRRLENLIAQLPGEKKNGLFGNLIALSLGLTPNFKSNFDLAEDAKLQLSKDTYDDDLDNLLAQIGDQYADLFLAAKNLSDAILLSDILRVNTEITKAPLSASMIKRYDEHHQDLTLLKALVRQQLPEKYKEIFFDQSKNGYAGYIDGGASQEEFYKFIKPILEKMDGTEELLVKLNREDLLRKQRTFDNGSIPHQIHLGELHAILRRQEDFYPFLKDNREKIEKILTFRIPYYVGPLARGNSRFAWMTRKSEETITPWNFEEVVDKGASAQSFIERMTNFDKNLPNEKVLPKHSLLYEYFTVYNELTKVKYVTEGMRKPAFLSGEQKKAIVDLLFKTNRKVTVKQLKEDYFKKIECFDSVEISGVEDRFNASLGTYHDLLKIIKDKDFLDNEENEDILEDIVLTLTLFEDREMIEERLKTYAHLFDDKVMKQLKRRRYTGWGRLSRKLINGIRDKQSGKTILDFLKSDGFANRNFMQLIHDDSLTFKEDIQKAQVSGQGDSLHEHIANLAGSPAIKKGILQTVKVVDELVKVMGRHKPENIVIEMARENQTTQKGQKNSRERMKRIEEGIKELGSQILKEHPVENTQLQNEKLYLYYLQNGRDMYVDQELDINRLSDYDVDHIVPQSFLKDDSIDNKVLTRSDKARGKSDNVPSEEVVKKMKNYWRQLLNAKLITQRKFDNLTKAERGGLSELDKAGFIKRQLVETRQITKHVAQILDSRMNTKYDENDKLIREVKVITLKSKLVSDFRKDFQFYKVREINNYHHAHDAYLNAVVGTALIKKYPKLESEFVYGDYKVYDVRKMIAKSEQEIGKATAKYFFYSNIMNFFKTEITLANGEIRKRPLIETNGETGEIVWDKGRDFATVRKVLSMPQVNIVKKTEVQTGGFSKESILPKRNSDKLIARKKDWDPKKYGGFDSPTVAYSVLVVAKVEKGKSKKLKSVKELLGITIMERSSFEKNPIDFLEAKGYKEVKKDLIIKLPKYSLFELENGRKRMLASAGELQKGNELALPSKYVNFLYLASHYEKLKGSPEDNEQKQLFVEQHKHYLDEIIEQISEFSKRVILADANLDKVLSAYNKHRDKPIREQAENIIHLFTLTNLGAPAAFKYFDTTIDRKRYTSTKEVLDATLIHQSITGLYETRIDLSQLGGDGGEAAAKGGGGSSGGTLNIEDEHRLHETSKEPDVSLGSTWLSDFPQAWAETGGMGLAVRQAPLIIPLKATSTPVSIKQYPMSQEARLGIKPHIQRLLDQGILVPCQSPWNTPLLPVKKPGTNDYRPVQDLREVNKRVEDIHPTVPNPYNLLSGLPPSHQWYTVLDLKDAFFCLRLHPTSQPLFAFEWRDPEMGISGQLTWTRLPQGFKNSPTLFDEALHRDLADFRIQHPDLILLQYVDDLLLAATSELDCQQGTRALLQTLGNLGYRASAKKAQICQKQVKYLGYLLKEGQRWLTEARKETVMGQPTPKTPRQLREFLGTAGFCRLWIPGFAEMAAPLYPLTKTGTLFNWGPDQQKAYQEIKQALLTAPALGLPDLTKPFELFVDEKQGYAKGVLTQKLGPWRRPVAYLSKKLDPVAAGWPPCLRMVAAIAVLTKDAGKLTMGQPLVILAPHAVEALVKQPPDRWLSNARMTHYQALLLDTDRVQFGPVVALNPATLLPLPEEGLQHNCLDILAEAHGTRPDLTDQPLPDADHTWYTDGSSLLQEGQRKAGAAVTTETEVIWAKALPAGTSAQRAELIALTQALKMAEGKKLNVYTDSRYAFATAHIHGEIYRRRGLLTSEGKEIKNKDEILALLKALFLPKRLSIIHCPGHQKGHSAEARGNRMADQAARKAAITETPDTSTLLAGKRTADGSEFEKRTADGSEFESPKKKAKVE

SEQ ID NO: 7331 - protein, 2096 aa, synthetic construct
MPAAKRVKLDGGDKKYSIGLDIGTNSVGWAVITDEYKVPSKKFKVLGNTDRHSIKKNLIGALLFDSGETAEATRLKRTARRRYTRRKNRICYLQEIFSNEMAKVDDSFFHRLEESFLVEEDKKHERHPIFGNIVDEVAYHEKYPTIYHLRKKLVDSTDKADLRLIYLALAHMIKFRGHFLIEGDLNPDNSDVDKLFIQLVQTYNQLFEENPINASGVDAKAILSARLSKSRRLENLIAQLPGEKKNGLFGNLIALSLGLTPNFKSNFDLAEDAKLQLSKDTYDDDLDNLLAQIGDQYADLFLAAKNLSDAILLSDILRVNTEITKAPLSASMIKRYDEHHQDLTLLKALVRQQLPEKYKEIFFDQSKNGYAGYIDGGASQEEFYKFIKPILEKMDGTEELLVKLNREDLLRKQRTFDNGSIPHQIHLGELHAILRRQEDFYPFLKDNREKIEKILTFRIPYYVGPLARGNSRFAWMTRKSEETITPWNFEEVVDKGASAQSFIERMTNFDKNLPNEKVLPKHSLLYEYFTVYNELTKVKYVTEGMRKPAFLSGEQKKAIVDLLFKTNRKVTVKQLKEDYFKKIECFDSVEISGVEDRFNASLGTYHDLLKIIKDKDFLDNEENEDILEDIVLTLTLFEDREMIEERLKTYAHLFDDKVMKQLKRRRYTGWGRLSRKLINGIRDKQSGKTILDFLKSDGFANRNFMQLIHDDSLTFKEDIQKAQVSGQGDSLHEHIANLAGSPAIKKGILQTVKVVDELVKVMGRHKPENIVIEMARENQTTQKGQKNSRERMKRIEEGIKELGSQILKEHPVENTQLQNEKLYLYYLQNGRDMYVDQELDINRLSDYDVDHIVPQSFLKDDSIDNKVLTRSDKARGKSDNVPSEEVVKKMKNYWRQLLNAKLITQRKFDNLTKAERGGLSELDKAGFIKRQLVETRQITKHVAQILDSRMNTKYDENDKLIREVKVITLKSKLVSDFRKDFQFYKVREINNYHHAHDAYLNAVVGTALIKKYPKLESEFVYGDYKVYDVRKMIAKSEQEIGKATAKYFFYSNIMNFFKTEITLANGEIRKRPLIETNGETGEIVWDKGRDFATVRKVLSMPQVNIVKKTEVQTGGFSKESILPKRNSDKLIARKKDWDPKKYGGFDSPTVAYSVLVVAKVEKGKSKKLKSVKELLGITIMERSSFEKNPIDFLEAKGYKEVKKDLIIKLPKYSLFELENGRKRMLASAGELQKGNELALPSKYVNFLYLASHYEKLKGSPEDNEQKQLFVEQHKHYLDEIIEQISEFSKRVILADANLDKVLSAYNKHRDKPIREQAENIIHLFTLTNLGAPAAFKYFDTTIDRKRYTSTKEVLDATLIHQSITGLYETRIDLSQLGGDGGEAAAKGGGGSSGGTLNIEDEYRLHEISTEPDVSPGSTWLSDFPQAWAETGGMGLAVRQAPLIIPLKATSTPVSIKQYPMSQEAKLGIKPHIQRLLDQGILVPCQSPWNTPLLPVKKPGTNDYRPVQGLREVNKRVEDIHPTVPNPYNLLSGLPTSHRWYTVLDLKDAFFCLRLHPTSQPLFASEWRDPGMGISGQLTWTRLPQGFKNSPTLFNEALHRGLADFRIQHPDLILLQYVDDLLLAATSELDCQQGTRALLKTLGNLGYRASAKKAQICQKQVKYLGYLLREGQRWLTEARKETVMGQPTPKTPRQLREFLGTAGFCRLWIPRFAEMAAPLYPLTKPGTLFNWGPDQQKAYHEIKQALLTAPALGLPDLTKPFELFVDEKQGYAKGVLTQKLGPWRRPVAYLSKKLDPVAAGWPPCLRMVAAIAVLTKDAGKLTMGQPLVILAPHAVEALVKQPPDRWLSNARMTHYQAMLLDTDRVQFGPVVALNPATLLPLPEEGAPHDCLEILAETHGTEPDLTDQPIPDADHTWYTDGSSFLQEGQRKAGAAVTTETEVIWARALPAGTSAQRAELIALTQALKMAEGKRLNVYTDSRYAFATAHIHGEIYKRRGWLTSEGREIKNKSEILALLKALFLPKRLSIIHCLGHQKGDSAEARGNRLADQAAREAAIKTPPDTSTLLAGKRTADGSEFEKRTADGSEFESPKKKAKVE

SEQ ID NO: 7332 - protein, 2087 aa, synthetic construct
MPAAKRVKLDGGDKKYSIGLDIGTNSVGWAVITDEYKVPSKKFKVLGNTDRHSIKKNLIGALLFDSGETAEATRLKRTARRRYTRRKNRICYLQEIFSNEMAKVDDSFFHRLEESFLVEEDKKHERHPIFGNIVDEVAYHEKYPTIYHLRKKLVDSTDKADLRLIYLALAHMIKFRGHFLIEGDLNPDNSDVDKLFIQLVQTYNQLFEENPINASGVDAKAILSARLSKSRRLENLIAQLPGEKKNGLFGNLIALSLGLTPNFKSNFDLAEDAKLQLSKDTYDDDLDNLLAQIGDQYADLFLAAKNLSDAILLSDILRVNTEITKAPLSASMIKRYDEHHQDLTLLKALVRQQLPEKYKEIFFDQSKNGYAGYIDGGASQEEFYKFIKPILEKMDGTEELLVKLNREDLLRKQRTFDNGSIPHQIHLGELHAILRRQEDFYPFLKDNREKIEKILTFRIPYYVGPLARGNSRFAWMTRKSEETITPWNFEEVVDKGASAQSFIERMTNFDKNLPNEKVLPKHSLLYEYFTVYNELTKVKYVTEGMRKPAFLSGEQKKAIVDLLFKTNRKVTVKQLKEDYFKKIECFDSVEISGVEDRFNASLGTYHDLLKIIKDKDFLDNEENEDILEDIVLTLTLFEDREMIEERLKTYAHLFDDKVMKQLKRRRYTGWGRLSRKLINGIRDKQSGKTILDFLKSDGFANRNFMQLIHDDSLTFKEDIQKAQVSGQGDSLHEHIANLAGSPAIKKGILQTVKVVDELVKVMGRHKPENIVIEMARENQTTQKGQKNSRERMKRIEEGIKELGSQILKEHPVENTQLQNEKLYLYYLQNGRDMYVDQELDINRLSDYDVDHIVPQSFLKDDSIDNKVLTRSDKARGKSDNVPSEEVVKKMKNYWRQLLNAKLITQRKFDNLTKAERGGLSELDKAGFIKRQLVETRQITKHVAQILDSRMNTKYDENDKLIREVKVITLKSKLVSDFRKDFQFYKVREINNYHHAHDAYLNAVVGTALIKKYPKLESEFVYGDYKVYDVRKMIAKSEQEIGKATAKYFFYSNIMNFFKTEITLANGEIRKRPLIETNGETGEIVWDKGRDFATVRKVLSMPQVNIVKKTEVQTGGFSKESILPKRNSDKLIARKKDWDPKKYGGFDSPTVAYSVLVVAKVEKGKSKKLKSVKELLGITIMERSSFEKNPIDFLEAKGYKEVKKDLIIKLPKYSLFELENGRKRMLASAGELQKGNELALPSKYVNFLYLASHYEKLKGSPEDNEQKQLFVEQHKHYLDEIIEQISEFSKRVILADANLDKVLSAYNKHRDKPIREQAENIIHLFTLTNLGAPAAFKYFDTTIDRKRYTSTKEVLDATLIHQSITGLYETRIDLSQLGGDGGEAAAKGGGGSSGGIPWLMKKPLQLTTLVPLQEYEERLLKQTMLTGSYKEKLQSLFLKYDALWQHWENQVGHRRIKPHHIATGTVNPRPQKQYPINPKAKASIQTVINDLLKQGVLIQQNSIMNTPVYPVPKPDGKWRMVLDYREVNKTIPLIAAQNQHSAGILSSIFRGKYKTTLDLSNGFWAHSITPESYWLTAFTWLGQQYCWTRLPQGFLNSPALFNADVVDLLKEVPNVQVYVDDIYISHDDPREHLEQLEKVFSLLLNAGYVVSLKKSEIAQHEVEFLGFNITKEGRGLTETFKQKLLNITPPRDLKQLQSILGLLNFARNFIPNFSELVKPLYNIIATAPGKYITWTTDNSQQLQNIISMLNSAENLEERNPEVRLIMKVNTSPSAGYIRFYNEFAKRPIMYLNYVYTKAEVKFTNTEKLLTTIHKGLIKALDLGMGQEILVYSPIVSMTKIQKTPLPERKALPIRWITWMSYLEDPRIQFHYDKTLPELQQVPTVTDDIIAKIKHPSEFSMVFYTDGSAIKHPNVNKSHNAGMGIAQVQFKPEFTVINTWSIPLGDHTAQLAEVAAVEFACKKALKIDGPVLIVTDSFYVAESVNKELPYWQSNGFFNNKKKPLKHVSKWKSIADCIQLKPDIIIIHEKGHQPTASTFHTEGNNLADKLATQGSYVVNAGKRTADGSEFEKRTADGSEFESPKKKAKVE

SEQ ID NO: 7333 - protein, 2176 aa, synthetic construct
MPAAKRVKLDGGDKKYSIGLDIGTNSVGWAVITDEYKVPSKKFKVLGNTDRHSIKKNLIGALLFDSGETAEATRLKRTARRRYTRRKNRICYLQEIFSNEMAKVDDSFFHRLEESFLVEEDKKHERHPIFGNIVDEVAYHEKYPTIYHLRKKLVDSTDKADLRLIYLALAHMIKFRGHFLIEGDLNPDNSDVDKLFIQLVQTYNQLFEENPINASGVDAKAILSARLSKSRRLENLIAQLPGEKKNGLFGNLIALSLGLTPNFKSNFDLAEDAKLQLSKDTYDDDLDNLLAQIGDQYADLFLAAKNLSDAILLSDILRVNTEITKAPLSASMIKRYDEHHQDLTLLKALVRQQLPEKYKEIFFDQSKNGYAGYIDGGASQEEFYKFIKPILEKMDGTEELLVKLNREDLLRKQRTFDNGSIPHQIHLGELHAILRRQEDFYPFLKDNREKIEKILTFRIPYYVGPLARGNSRFAWMTRKSEETITPWNFEEVVDKGASAQSFIERMTNFDKNLPNEKVLPKHSLLYEYFTVYNELTKVKYVTEGMRKPAFLSGEQKKAIVDLLFKTNRKVTVKQLKEDYFKKIECFDSVEISGVEDRFNASLGTYHDLLKIIKDKDFLDNEENEDILEDIVLTLTLFEDREMIEERLKTYAHLFDDKVMKQLKRRRYTGWGRLSRKLINGIRDKQSGKTILDFLKSDGFANRNFMQLIHDDSLTFKEDIQKAQVSGQGDSLHEHIANLAGSPAIKKGILQTVKVVDELVKVMGRHKPENIVIEMARENQTTQKGQKNSRERMKRIEEGIKELGSQILKEHPVENTQLQNEKLYLYYLQNGRDMYVDQELDINRLSDYDVDHIVPQSFLKDDSIDNKVLTRSDKARGKSDNVPSEEVVKKMKNYWRQLLNAKLITQRKFDNLTKAERGGLSELDKAGFIKRQLVETRQITKHVAQILDSRMNTKYDENDKLIREVKVITLKSKLVSDFRKDFQFYKVREINNYHHAHDAYLNAVVGTALIKKYPKLESEFVYGDYKVYDVRKMIAKSEQEIGKATAKYFFYSNIMNFFKTEITLANGEIRKRPLIETNGETGEIVWDKGRDFATVRKVLSMPQVNIVKKTEVQTGGFSKESILPKRNSDKLIARKKDWDPKKYGGFDSPTVAYSVLVVAKVEKGKSKKLKSVKELLGITIMERSSFEKNPIDFLEAKGYKEVKKDLIIKLPKYSLFELENGRKRMLASAGELQKGNELALPSKYVNFLYLASHYEKLKGSPEDNEQKQLFVEQHKHYLDEIIEQISEFSKRVILADANLDKVLSAYNKHRDKPIREQAENIIHLFTLTNLGAPAAFKYFDTTIDRKRYTSTKEVLDATLIHQSITGLYETRIDLSQLGGDGGEAAAKGGGGSSGGMDPLQLLQPLEAEIKGTKLKAHWNSGATITCVPQAFLEEEVPIKNIWIKTIHGEKEQPVYYLTFKIQGRKVEAEVISSPYDYILVSPSDIPWLMKKPLQLTTLVPLQEYEERLLKQTMLTGSYKEKLQSLFLKYDALWQHWENQVGHRRIKPHHIATGTVNPRPQKQYPINPKAKASIQTVINDLLKQGVLIQQNSIMNTPVYPVPKPDGKWRMVLDYREVNKTIPLIAAQNQHSAGILSSIFRGKYKTTLDLSNGFWAHSITPESYWLTAFTWLGQQYCWTRLPQGFLNSPALFNADVVDLLKEVPNVQVYVDDIYISHDDPREHLEQLEKVFSLLLNAGYVVSLKKSEIAQHEVEFLGFNITKEGRGLTETFKQKLLNITPPRDLKQLQSILGKLNFARNFIPNFSELVKPLYNIIATAPGKYITWTTDNSQQLQNIISMLNSAENLEERNPEVRLIMKVNTSPSAGYIRFYNEFAKRPIMYLNYVYTKAEVKFTNTEKLLTTIHKGLIKALDLGMGQEILVYSPIVSMTKIQKTPLPERKALPIRWITWMSYLEDPRIQFHYDKTLPELQQVPTVTDDIIAKIKHPSEFSMVFYTDGSAIKHPNVNKSHNAGMGIAQVQFKPEFTVINTWSIPLGDHTAQLAEVAAVEFACKKALKIDGPVLIVTDSFYVAESVNKELPYWQSNGFFNNKKKPLKHVSKWKSIADCIQLKPDIIIIHEKGHQPTASTFHTEGNNLADKLATQGSYVVNAGKRTADGSEFEKRTADGSEFESPKKKAKVE

SEQ ID NO: 7334 - protein, 2087 aa, synthetic construct
MPAAKRVKLDGGDKKYSIGLDIGTNSVGWAVITDEYKVPSKKFKVLGNTDRHSIKKNLIGALLFDSGETAEATRLKRTARRRYTRRKNRICYLQEIFSNEMAKVDDSFFHRLEESFLVEEDKKHERHPIFGNIVDEVAYHEKYPTIYHLRKKLVDSTDKADLRLIYLALAHMIKFRGHFLIEGDLNPDNSDVDKLFIQLVQTYNQLFEENPINASGVDAKAILSARLSKSRRLENLIAQLPGEKKNGLFGNLIALSLGLTPNFKSNFDLAEDAKLQLSKDTYDDDLDNLLAQIGDQYADLFLAAKNLSDAILLSDILRVNTEITKAPLSASMIKRYDEHHQDLTLLKALVRQQLPEKYKEIFFDQSKNGYAGYIDGGASQEEFYKFIKPILEKMDGTEELLVKLNREDLLRKQRTFDNGSIPHQIHLGELHAILRRQEDFYPFLKDNREKIEKILTFRIPYYVGPLARGNSRFAWMTRKSEETITPWNFEEVVDKGASAQSFIERMTNFDKNLPNEKVLPKHSLLYEYFTVYNELTKVKYVTEGMRKPAFLSGEQKKAIVDLLFKTNRKVTVKQLKEDYFKKIECFDSVEISGVEDRFNASLGTYHDLLKIIKDKDFLDNEENEDILEDIVLTLTLFEDREMIEERLKTYAHLFDDKVMKQLKRRRYTGWGRLSRKLINGIRDKQSGKTILDFLKSDGFANRNFMQLIHDDSLTFKEDIQKAQVSGQGDSLHEHIANLAGSPAIKKGILQTVKVVDELVKVMGRHKPENIVIEMARENQTTQKGQKNSRERMKRIEEGIKELGSQILKEHPVENTQLQNEKLYLYYLQNGRDMYVDQELDINRLSDYDVDHIVPQSFLKDDSIDNKVLTRSDKARGKSDNVPSEEVVKKMKNYWRQLLNAKLITQRKFDNLTKAERGGLSELDKAGFIKRQLVETRQITKHVAQILDSRMNTKYDENDKLIREVKVITLKSKLVSDFRKDFQFYKVREINNYHHAHDAYLNAVVGTALIKKYPKLESEFVYGDYKVYDVRKMIAKSEQEIGKATAKYFFYSNIMNFFKTEITLANGEIRKRPLIETNGETGEIVWDKGRDFATVRKVLSMPQVNIVKKTEVQTGGFSKESILPKRNSDKLIARKKDWDPKKYGGFDSPTVAYSVLVVAKVEKGKSKKLKSVKELLGITIMERSSFEKNPIDFLEAKGYKEVKKDLIIKLPKYSLFELENGRKRMLASAGELQKGNELALPSKYVNFLYLASHYEKLKGSPEDNEQKQLFVEQHKHYLDEIIEQISEFSKRVILADANLDKVLSAYNKHRDKPIREQAENIIHLFTLTNLGAPAAFKYFDTTIDRKRYTSTKEVLDATLIHQSITGLYETRIDLSQLGGDGGEAAAKGGGGSSGGVPWLTQQPLQLTILVPLQEYQDRILNKTALPEEQKQQLKALFTKYDNLWQHWENQVGHRKIRPHNIATGDYPPRPQKQYPINPKAKPSIQIVIDDLLKQGVLTPQNSTMNTPVYPVPKPDGRWRMVLDYREVNKTIPLTAAQNQHSAGILATIVRQKYKTTLDLANGFWAHPITPDSYWLTAFTWQGKQYCWTRLPQGFLNSPALFNADAVDLLKEVPNVQVYVDDIYLSHDNPHEHIQQLEKVFQILLQAGYVVSLKKSEIGQRTVEFLGFNITKEGRGLTDTFKTKLLNVTPPKDLKQLQSILGKLNFARNFIPNFAELVQTLYNLIASSPGKYIEWTEDNTKQLNKVIEALNTASNLEERLPDQRLVIKVNTSPSAGYVRYYNESGKKPIMYLNYVFSKAELKFSMLEKLLTTMHKALIKAMDLAMGQEILVYSPIVSMTKIQKTPLPERKALPIRWITWMTYLEDPRIQFHYDKTLPELKHIPDVYTSSIPPLKHPSQYEGVFCTDGSAIKSPDPTKSNNAGMGIVHAIYNPEYKILNQWSIPLGHHTAQMAEIAAVEFACKKALKVPGPVLVITDSFYVAESANKELPYWKSNGFVNNKKEPLKHISKWKSIAECLSIKPDITIQHEKGHQPINTSIHTEGNALADKLATQGSYVVNAGKRTADGSEFEKRTADGSEFESPKKKAKVE

SEQ ID NO: 7335 - protein, 2094 aa, synthetic construct; identical to SEQ ID NO: 4531

SEQ ID NO: 7336 - protein, 2098 aa, synthetic construct
MPAAKRVKLDGGDKKYSIGLDIGTNSVGWAVITDEYKVPSKKFKVLGNTDRHSIKKNLIGALLFDSGETAEATRLKRTARRRYTRRKNRICYLQEIFSNEMAKVDDSFFHRLEESFLVEEDKKHERHPIFGNIVDEVAYHEKYPTIYHLRKKLVDSTDKADLRLIYLALAHMIKFRGHFLIEGDLNPDNSDVDKLFIQLVQTYNQLFEENPINASGVDAKAILSARLSKSRRLENLIAQLPGEKKNGLFGNLIALSLGLTPNFKSNFDLAEDAKLQLSKDTYDDDLDNLLAQIGDQYADLFLAAKNLSDAILLSDILRVNTEITKAPLSASMIKRYDEHHQDLTLLKALVRQQLPEKYKEIFFDQSKNGYAGYIDGGASQEEFYKFIKPILEKMDGTEELLVKLNREDLLRKQRTFDNGSIPHQIHLGELHAILRRQEDFYPFLKDNREKIEKILTFRIPYYVGPLARGNSRFAWMTRKSEETITPWNFEEVVDKGASAQSFIERMTNFDKNLPNEKVLPKHSLLYEYFTVYNELTKVKYVTEGMRKPAFLSGEQKKAIVDLLFKTNRKVTVKQLKEDYFKKIECFDSVEISGVEDRFNASLGTYHDLLKIIKDKDFLDNEENEDILEDIVLTLTLFEDREMIEERLKTYAHLFDDKVMKQLKRRRYTGWGRLSRKLINGIRDKQSGKTILDFLKSDGFANRNFMQLIHDDSLTFKEDIQKAQVSGQGDSLHEHIANLAGSPAIKKGILQTVKVVDELVKVMGRHKPENIVIEMARENQTTQKGQKNSRERMKRIEEGIKELGSQILKEHPVENTQLQNEKLYLYYLQNGRDMYVDQELDINRLSDYDVDHIVPQSFLKDDSIDNKVLTRSDKARGKSDNVPSEEVVKKMKNYWRQLLNAKLITQRKFDNLTKAERGGLSELDKAGFIKRQLVETRQITKHVAQILDSRMNTKYDENDKLIREVKVITLKSKLVSDFRKDFQFYKVREINNYHHAHDAYLNAVVGTALIKKYPKLESEFVYGDYKVYDVRKMIAKSEQEIGKATAKYFFYSNIMNFFKTEITLANGEIRKRPLIETNGETGEIVWDKGRDFATVRKVLSMPQVNIVKKTEVQTGGFSKESILPKRNSDKLIARKKDWDPKKYGGFDSPTVAYSVLVVAKVEKGKSKKLKSVKELLGITIMERSSFEKNPIDFLEAKGYKEVKKDLIIKLPKYSLFELENGRKRMLASAGELQKGNELALPSKYVNFLYLASHYEKLKGSPEDNEQKQLFVEQHKHYLDEIIEQISEFSKRVILADANLDKVLSAYNKHRDKPIREQAENIIHLFTLTNLGAPAAFKYFDTTIDRKRYTSTKEVLDATLIHQSITGLYETRIDLSQLGGDGGEAAAKGSSGGGGGTAPLEEEYRLFLEAPIQNVTLLEQWKREIPKVWAEINPPGLASTQAPIHVQLLSTALPVRVRQYPITLEAKRSLRETIRKFRAAGILRPVHSPWNTPLLPVRKSGTSEYRMVQDLREVNKRVETIHPTVPNPYTLLSLLPPDRIWYSVLDLKDAFFCIPLAPESQLIFAFEWADAEEGESGQLTWTRLPQGFKNSPTLFNEALNRDLQGFRLDHPSVSLLQYVDDLLIAADTQAACLSATRDLLMTLAELGYRVSGKKAQLCQEEVTYLGFKIHKGSRSLSNSRTQAILQIPVPKTKRQVREFLGTIGYCRLWIPGFAELAQPLYAATRPGNDPLVWGEKEEEAFQSLKLALTQPPALALPSLDKPFQLFVEETSGAAKGVLTQALGPWKRPVAYLSKRLDPVAAGWPRCLRAIAAAALLTREASKLTFGQDIEITSSHNLESLLRSPPDKWLTNARITQYQVLLLDPPRVRFKQTAALNPATLLPETDDTLPIHHCLDTLDSLTSTRPDLTDQPLAQAEATLFTDGSSYIRDGKRYAGAAVVTLDSVIWAEPLPIGTSAQKAELIALTKALEWSKDKSVNIYTDSRYAFATLHVHGMIYRERGWLTAGGKAIKNAPEILALLTAVWLPKRVAVMHCKGHQKDDAPTSTGNRRADEVAREVAIRPLSTQATISAGKRTADGSEFEKRTADGSEFESPKKKAKVE

SEQ ID NO: 7337 - protein, 2173 aa, synthetic construct
MPAAKRVKLDGGDKKYSIGLDIGTNSVGWAVITDEYKVPSKKFKVLGNTDRHSIKKNLIGALLFDSGETAEATRLKRTARRRYTRRKNRICYLQEIFSNEMAKVDDSFFHRLEESFLVEEDKKHERHPIFGNIVDEVAYHEKYPTIYHLRKKLVDSTDKADLRLIYLALAHMIKFRGHFLIEGDLNPDNSDVDKLFIQLVQTYNQLFEENPINASGVDAKAILSARLSKSRRLENLIAQLPGEKKNGLFGNLIALSLGLTPNFKSNFDLAEDAKLQLSKDTYDDDLDNLLAQIGDQYADLFLAAKNLSDAILLSDILRVNTEITKAPLSASMIKRYDEHHQDLTLLKALVRQQLPEKYKEIFFDQSKNGYAGYIDGGASQEEFYKFIKPILEKMDGTEELLVKLNREDLLRKQRTFDNGSIPHQIHLGELHAILRRQEDFYPFLKDNREKIEKILTFRIPYYVGPLARGNSRFAWMTRKSEETITPWNFEEVVDKGASAQSFIERMTNFDKNLPNEKVLPKHSLLYEYFTVYNELTKVKYVTEGMRKPAFLSGEQKKAIVDLLFKTNRKVTVKQLKEDYFKKIECFDSVEISGVEDRFNASLGTYHDLLKIIKDKDFLDNEENEDILEDIVLTLTLFEDREMIEERLKTYAHLFDDKVMKQLKRRRYTGWGRLSRKLINGIRDKQSGKTILDFLKSDGFANRNFMQLIHDDSLTFKEDIQKAQVSGQGDSLHEHIANLAGSPAIKKGILQTVKVVDELVKVMGRHKPENIVIEMARENQTTQKGQKNSRERMKRIEEGIKELGSQILKEHPVENTQLQNEKLYLYYLQNGRDMYVDQELDINRLSDYDVDHIVPQSFLKDDSIDNKVLTRSDKARGKSDNVPSEEVVKKMKNYWRQLLNAKLITQRKFDNLTKAERGGLSELDKAGFIKRQLVETRQITKHVAQILDSRMNTKYDENDKLIREVKVITLKSKLVSDFRKDFQFYKVREINNYHHAHDAYLNAVVGTALIKKYPKLESEFVYGDYKVYDVRKMIAKSEQEIGKATAKYFFYSNIMNFFKTEITLANGEIRKRPLIETNGETGEIVWDKGRDFATVRKVLSMPQVNIVKKTEVQTGGFSKESILPKRNSDKLIARKKDWDPKKYGGFDSPTVAYSVLVVAKVEKGKSKKLKSVKELLGITIMERSSFEKNPIDFLEAKGYKEVKKDLIIKLPKYSLFELENGRKRMLASAGELQKGNELALPSKYVNFLYLASHYEKLKGSPEDNEQKQLFVEQHKHYLDEIIEQISEFSKRVILADANLDKVLSAYNKHRDKPIREQAENIIHLFTLTNLGAPAAFKYFDTTIDRKRYTSTKEVLDATLIHQSITGLYETRIDLSQLGGDGGEAAAKGSSGGGGGMDLLKPLTVERKGVKIKGYWNSQADITCVPKDLLQGEEPVRQQNVTTIHGTQEGDVYYVNLKIDGRRINTEVIGTTLDYAIITPGDVPWILKKPLELTIKLDLEEQQGTLLNNSILSKKGKEELKQLFEKYSALWQSWENQVGHRRIRPHKIATGTVKPTPQKQYHINPKAKPDIQIVINDLLKQGVLIQKESTMNTPVYPVPKPNGRWRMVLDYRAVNKVTPLIAVQNQHSYGILGSLFKGRYKTTIDLSNGFWAHPIVPEDYWITAFTWQGKQYCWTVLPQGFLNSPGLFTGDVVDLLQGIPNVEVYVDDVYISHDSEKEHLEYLDILFNRLKEAGYIISLKKSNIANSIVDFLGFQITNEGRGLTDTFKEKLENITAPTTLKQLQSILGLLNFARNFIPDFTELIAPLYALIPKSTKNYVPWQIEHSTTLETLITKLNGAEYLQGRKGDKTLIMKVNASYTTGYIRYYNEGEKKPISYVSIVFSKTELKFTELEKLLTTVHKGLLKALDLSMGQNIHVYSPIVSMQNIQKTPQTAKKALASRWLSWLSYLEDPRIRFFYDPQMPALKDLPAVDTGKDNKKHPSNFQHIFYTDGSAITSPTKEGHLNAGMGIVYFINKDGNLQKQQEWSISLGNHTAQFAEIAAFEFALKKCLPLGGNILVVTDSNYVAKAYNEELDVWASNGFVNNRKKPLKHISKWKSVADLKRLRPDVVVTHEPGHQKLDSSPHAYGNNLADQLATQASFKVHAGKRTADGSEFEKRTADGSEFESPKKKAKVE

SEQ ID NO: 7338 - protein, 2127 aa, synthetic construct
MPAAKRVKLDGGDKKYSIGLDIGTNSVGWAVITDEYKVPSKKFKVLGNTDRHSIKKNLIGALLFDSGETAEATRLKRTARRRYTRRKNRICYLQEIFSNEMAKVDDSFFHRLEESFLVEEDKKHERHPIFGNIVDEVAYHEKYPTIYHLRKKLVDSTDKADLRLIYLALAHMIKFRGHFLIEGDLNPDNSDVDKLFIQLVQTYNQLFEENPINASGVDAKAILSARLSKSRRLENLIAQLPGEKKNGLFGNLIALSLGLTPNFKSNFDLAEDAKLQLSKDTYDDDLDNLLAQIGDQYADLFLAAKNLSDAILLSDILRVNTEITKAPLSASMIKRYDEHHQDLTLLKALVRQQLPEKYKEIFFDQSKNGYAGYIDGGASQEEFYKFIKPILEKMDGTEELLVKLNREDLLRKQRTFDNGSIPHQIHLGELHAILRRQEDFYPFLKDNREKIEKILTFRIPYYVGPLARGNSRFAWMTRKSEETITPWNFEEVVDKGASAQSFIERMTNFDKNLPNEKVLPKHSLLYEYFTVYNELTKVKYVTEGMRKPAFLSGEQKKAIVDLLFKTNRKVTVKQLKEDYFKKIECFDSVEISGVEDRFNASLGTYHDLLKIIKDKDFLDNEENEDILEDIVLTLTLFEDREMIEERLKTYAHLFDDKVMKQLKRRRYTGWGRLSRKLINGIRDKQSGKTILDFLKSDGFANRNFMQLIHDDSLTFKEDIQKAQVSGQGDSLHEHIANLAGSPAIKKGILQTVKVVDELVKVMGRHKPENIVIEMARENQTTQKGQKNSRERMKRIEEGIKELGSQILKEHPVENTQLQNEKLYLYYLQNGRDMYVDQELDINRLSDYDVDHIVPQSFLKDDSIDNKVLTRSDKARGKSDNVPSEEVVKKMKNYWRQLLNAKLITQRKFDNLTKAERGGLSELDKAGFIKRQLVETRQITKHVAQILDSRMNTKYDENDKLIREVKVITLKSKLVSDFRKDFQFYKVREINNYHHAHDAYLNAVVGTALIKKYPKLESEFVYGDYKVYDVRKMIAKSEQEIGKATAKYFFYSNIMNFFKTEITLANGEIRKRPLIETNGETGEIVWDKGRDFATVRKVLSMPQVNIVKKTEVQTGGFSKESILPKRNSDKLIARKKDWDPKKYGGFDSPTVAYSVLVVAKVEKGKSKKLKSVKELLGITIMERSSFEKNPIDFLEAKGYKEVKKDLIIKLPKYSLFELENGRKRMLASAGELQKGNELALPSKYVNFLYLASHYEKLKGSPEDNEQKQLFVEQHKHYLDEIIEQISEFSKRVILADANLDKVLSAYNKHRDKPIREQAENIIHLFTLTNLGAPAAFKYFDTTIDRKRYTSTKEVLDATLIHQSITGLYETRIDLSQLGGDGGEAAAKGSSGGGGGLLGRDLLTKLKAQIQFSTEGPQVTWEDRPAMCLVLNLEEEYRLHEKPVPPSIDPSWLQLFPMVWAEKAGMGLANQVPPVVVELKSDASPVAVRQYPMSKEAREGIRPHIQRFLDLGILVPCQSPWNTPLLPVKKPGTNDYRPVQDLREVNKRVQDIHPTVPNPYNLLSSLPPSHTWYSVLDLKDAFFCLKLHPNSQPLFAFEWRDPEKGNTGQLTWTRLPQGFKNSPTLFNEALHRDLASFRALNPQVVMLQYVDDLLVAAPTYRDCKEGTRRLLQELSKLGYRVSAKKAQLCREEVTYLGYLLKGGKRWLTPARKATVMKIPTPTTPRQVREFLGTAGFCRLWIPGFASLAAPLYPLTRPKVPFTWTEAHQEAFGRIKEALLSAPALALPDLTKPFALYVDEKEGVARGVLTQTLGPWRRPVAYLSKKLDPVASGWPTCLKAIAAVALLLKDADKLTLGQNVLVIAPHNLESIVRQPPDRWMTNARMTHYQSLLLNERVSFAPPAILNPATLLPVESDDTPIHICSEILAEETGTRPDLRDQPLPGVPAWYTDGSSFIMDGRRQAGAAIVDNKRTVWASNLPEGTSAQKAELIALTQALRLAEGKSINIYTDSRYAFATAHVHGAIYKQRGWLTSAGKDIKNKEEILALLEAIHLPKRVAIIHCPGHQRGTDPVATGNRKADEAAKQAAQSTRILTETTKNAGKRTADGSEFEKRTADGSEFESPKKKAKVE

SEQ ID NO: 7339 - protein, 2218 aa, synthetic construct
MPAAKRVKLDGGDKKYSIGLDIGTNSVGWAVITDEYKVPSKKFKVLGNTDRHSIKKNLIGALLFDSGETAEATRLKRTARRRYTRRKNRICYLQEIFSNEMAKVDDSFFHRLEESFLVEEDKKHERHPIFGNIVDEVAYHEKYPTIYHLRKKLVDSTDKADLRLIYLALAHMIKFRGHFLIEGDLNPDNSDVDKLFIQLVQTYNQLFEENPINASGVDAKAILSARLSKSRRLENLIAQLPGEKKNGLFGNLIALSLGLTPNFKSNFDLAEDAKLQLSKDTYDDDLDNLLAQIGDQYADLFLAAKNLSDAILLSDILRVNTEITKAPLSASMIKRYDEHHQDLTLLKALVRQQLPEKYKEIFFDQSKNGYAGYIDGGASQEEFYKFIKPILEKMDGTEELLVKLNREDLLRKQRTFDNGSIPHQIHLGELHAILRRQEDFYPFLKDNREKIEKILTFRIPYYVGPLARGNSRFAWMTRKSEETITPWNFEEVVDKGASAQSFIERMTNFDKNLPNEKVLPKHSLLYEYFTVYNELTKVKYVTEGMRKPAFLSGEQKKAIVDLLFKTNRKVTVKQLKEDYFKKIECFDSVEISGVEDRFNASLGTYHDLLKIIKDKDFLDNEENEDILEDIVLTLTLFEDREMIEERLKTYAHLFDDKVMKQLKRRRYTGWGRLSRKLINGIRDKQSGKTILDFLKSDGFANRNFMQLIHDDSLTFKEDIQKAQVSGQGDSLHEHIANLAGSPAIKKGILQTVKVVDELVKVMGRHKPENIVIEMARENQTTQKGQKNSRERMKRIEEGIKELGSQILKEHPVENTQLQNEKLYLYYLQNGRDMYVDQELDINRLSDYDVDHIVPQSFLKDDSIDNKVLTRSDKARGKSDNVPSEEVVKKMKNYWRQLLNAKLITQRKFDNLTKAERGGLSELDKAGFIKRQLVETRQITKHVAQILDSRMNTKYDENDKLIREVKVITLKSKLVSDFRKDFQFYKVREINNYHHAHDAYLNAVVGTALIKKYPKLESEFVYGDYKVYDVRKMIAKSEQEIGKATAKYFFYSNIMNFFKTEITLANGEIRKRPLIETNGETGEIVWDKGRDFATVRKVLSMPQVNIVKKTEVQTGGFSKESILPKRNSDKLIARKKDWDPKKYGGFDSPTVAYSVLVVAKVEKGKSKKLKSVKELLGITIMERSSFEKNPIDFLEAKGYKEVKKDLIIKLPKYSLFELENGRKRMLASAGELQKGNELALPSKYVNFLYLASHYEKLKGSPEDNEQKQLFVEQHKHYLDEIIEQISEFSKRVILADANLDKVLSAYNKHRDKPIREQAENIIHLFTLTNLGAPAAFKYFDTTIDRKRYTSTKEVLDATLIHQSITGLYETRIDLSQLGGDGGEAAAKGSSGGGGGTLGDQGSRGSDPLPEPRVTLTVEGIPTEFLVNTGAEHSVLTKPMGKMGSKRTVVAGATGSKVYPWTTKRLLKIGQKQVTHSFLVIPECPAPLLGRDLLTKLKAQIQFSTEGPQVTWEDRPAMCLVLNLEEEYRLHEKPVPPSIDPSWLQLFPMVWAEKAGMGLANQVPPVVVELKSDASPVAVRQYPMSKEAREGIRPHIQRFLDLGILVPCQSPWNTPLLPVKKPGTNDYRPVQDLREVNKRVQDIHPTVPNPYNLLSSLPPSHTWYSVLDLKDAFFCLKLHPNSQPLFAFEWRDPEKGNTGQLTWTRLPQGFKNSPTLFNEALHRDLASFRALNPQVVMLQYVDDLLVAAPTYRDCKEGTRRLLQELSKLGYRVSAKKAQLCREEVTYLGYLLKGGKRWLTPARKATVMKIPTPTTPRQVREFLGKAGFCRLFIPGFASLAAPLYPLTRPKVPFTWTEAHQEAFGRIKEALLSAPALALPDLTKPFALYVDEKEGVARGVLTQTLGPWRRPVAYLSKKLDPVASGWPTCLKAIAAVALLLKDADKLTLGQNVLVIAPHNLESIVRQPPDRWMTNARMTHYQSLLLNERVSFAPPAILNPATLLPVESDDTPIHICSEILAEETGTRPDLRDQPLPGVPAWYTDGSSFIMDGRRQAGAAIVDNKRTVWASNLPEGTSAQKAELIALTQALRLAEGKSINIYTDSRYAFATAHVHGAIYKQRGWLTSAGKDIKNKEEILALLEAIHLPKRVAIIHCPGHQRGTDPVATGNRKADEAAKQAAQSTRILTETTKNAGKRTADGSEFEKRTADGSEFESPKKKAKVE

SEQ ID NO: 7340 - protein, 2096 aa, synthetic construct
MPAAKRVKLDGGDKKYSIGLDIGTNSVGWAVITDEYKVPSKKFKVLGNTDRHSIKKNLIGALLFDSGETAEATRLKRTARRRYTRRKNRICYLQEIFSNEMAKVDDSFFHRLEESFLVEEDKKHERHPIFGNIVDEVAYHEKYPTIYHLRKKLVDSTDKADLRLIYLALAHMIKFRGHFLIEGDLNPDNSDVDKLFIQLVQTYNQLFEENPINASGVDAKAILSARLSKSRRLENLIAQLPGEKKNGLFGNLIALSLGLTPNFKSNFDLAEDAKLQLSKDTYDDDLDNLLAQIGDQYADLFLAAKNLSDAILLSDILRVNTEITKAPLSASMIKRYDEHHQDLTLLKALVRQQLPEKYKEIFFDQSKNGYAGYIDGGASQEEFYKFIKPILEKMDGTEELLVKLNREDLLRKQRTFDNGSIPHQIHLGELHAILRRQEDFYPFLKDNREKIEKILTFRIPYYVGPLARGNSRFAWMTRKSEETITPWNFEEVVDKGASAQSFIERMTNFDKNLPNEKVLPKHSLLYEYFTVYNELTKVKYVTEGMRKPAFLSGEQKKAIVDLLFKTNRKVTVKQLKEDYFKKIECFDSVEISGVEDRFNASLGTYHDLLKIIKDKDFLDNEENEDILEDIVLTLTLFEDREMIEERLKTYAHLFDDKVMKQLKRRRYTGWGRLSRKLINGIRDKQSGKTILDFLKSDGFANRNFMQLIHDDSLTFKEDIQKAQVSGQGDSLHEHIANLAGSPAIKKGILQTVKVVDELVKVMGRHKPENIVIEMARENQTTQKGQKNSRERMKRIEEGIKELGSQILKEHPVENTQLQNEKLYLYYLQNGRDMYVDQELDINRLSDYDVDHIVPQSFLKDDSIDNKVLTRSDKARGKSDNVPSEEVVKKMKNYWRQLLNAKLITQRKFDNLTKAERGGLSELDKAGFIKRQLVETRQITKHVAQILDSRMNTKYDENDKLIREVKVITLKSKLVSDFRKDFQFYKVREINNYHHAHDAYLNAVVGTALIKKYPKLESEFVYGDYKVYDVRKMIAKSEQEIGKATAKYFFYSNIMNFFKTEITLANGEIRKRPLIETNGETGEIVWDKGRDFATVRKVLSMPQVNIVKKTEVQTGGFSKESILPKRNSDKLIARKKDWDPKKYGGFDSPTVAYSVLVVAKVEKGKSKKLKSVKELLGITIMERSSFEKNPIDFLEAKGYKEVKKDLIIKLPKYSLFELENGRKRMLASAGELQKGNELALPSKYVNFLYLASHYEKLKGSPEDNEQKQLFVEQHKHYLDEIIEQISEFSKRVILADANLDKVLSAYNKHRDKPIREQAENIIHLFTLTNLGAPAAFKYFDTTIDRKRYTSTKEVLDATLIHQSITGLYETRIDLSQLGGDGGEAAAKGSSGGGGGTLGIEDEYRLHETSTEPDVSLGSTWLSDFPQAWAETGGMGLAVRQAPLIIPLKATSTPVSIQQYPMSHEARLGIKPHIQRLLDQGILVPCQSPWNTPLLPVKKPGTNDYRPVQDLREVNKRVEDIHPTVPNPYNLLSGLPPSHQWYTVLDLKDAFFCLRLHPTSQPLFAFEWRDPGMGISGQLTWTRLPQGFKNSPTLFNEALHRDLADFRIQHPDLILLQYVDDILLAATSELDCQQGTRALLQTLGDLGYRASAKKAQICQKQVKYLGYLLREGQRWLTEARKETVMGQPVPKTPRQLREFLGTAGFCRLWIPGFAEMAAPLYPLTKPGTLFSWGPDQQKAYQEIKQALLTAPALGLPDLTKPFELFVDEKQGYAKGVLTQKLGPWRRPVAYLSKKLDPVAAGWPPCLRMVAAIAVLTKDAGKLTMGQPLVILAPHAVEALVKQPPDRWLSNARMTHYQAMLLDTDRVQFGPVVALNPATLLPLPEEGAPHDCLEILAETHGTRPDLTDQPIPDADHTWYTDGSSFLQEGQRKAGAAVTTETEVIWAGALPAGTSAQRAELIALTQALKMAEGKRLNVYTDSRYAFATAHIHGEIYRRRGWLTSEGREIKNKSEILALLKALFLPKRLSIIHCLGHQKGDSAEARGNRLADQAAREAAIKTPPDTSTLLAGKRTADGSEFEKRTADGSEFESPKKKAKVE

SEQ ID NO: 7341 - protein, 2096 aa, synthetic construct
MPAAKRVKLDGGDKKYSIGLDIGTNSVGWAVITDEYKVPSKKFKVLGNTDRHSIKKNLIGALLFDSGETAEATRLKRTARRRYTRRKNRICYLQEIFSNEMAKVDDSFFHRLEESFLVEEDKKHERHPIFGNIVDEVAYHEKYPTIYHLRKKLVDSTDKADLRLIYLALAHMIKFRGHFLIEGDLNPDNSDVDKLFIQLVQTYNQLFEENPINASGVDAKAILSARLSKSRRLENLIAQLPGEKKNGLFGNLIALSLGLTPNFKSNFDLAEDAKLQLSKDTYDDDLDNLLAQIGDQYADLFLAAKNLSDAILLSDILRVNTEITKAPLSASMIKRYDEHHQDLTLLKALVRQQLPEKYKEIFFDQSKNGYAGYIDGGASQEEFYKFIKPILEKMDGTEELLVKLNREDLLRKQRTFDNGSIPHQIHLGELHAILRRQEDFYPFLKDNREKIEKILTFRIPYYVGPLARGNSRFAWMTRKSEETITPWNFEEVVDKGASAQSFIERMTNFDKNLPNEKVLPKHSLLYEYFTVYNELTKVKYVTEGMRKPAFLSGEQKKAIVDLLFKTNRKVTVKQLKEDYFKKIECFDSVEISGVEDRFNASLGTYHDLLKIIKDKDFLDNEENEDILEDIVLTLTLFEDREMIEERLKTYAHLFDDKVMKQLKRRRYTGWGRLSRKLINGIRDKQSGKTILDFLKSDGFANRNFMQLIHDDSLTFKEDIQKAQVSGQGDSLHEHIANLAGSPAIKKGILQTVKVVDELVKVMGRHKPENIVIEMARENQTTQKGQKNSRERMKRIEEGIKELGSQILKEHPVENTQLQNEKLYLYYLQNGRDMYVDQELDINRLSDYDVDHIVPQSFLKDDSIDNKVLTRSDKARGKSDNVPSEEVVKKMKNYWRQLLNAKLITQRKFDNLTKAERGGLSELDKAGFIKRQLVETRQITKHVAQILDSRMNTKYDENDKLIREVKVITLKSKLVSDFRKDFQFYKVREINNYHHAHDAYLNAVVGTALIKKYPKLESEFVYGDYKVYDVRKMIAKSEQEIGKATAKYFFYSNIMNFFKTEITLANGEIRKRPLIETNGETGEIVWDKGRDFATVRKVLSMPQVNIVKKTEVQTGGFSKESILPKRNSDKLIARKKDWDPKKYGGFDSPTVAYSVLVVAKVEKGKSKKLKSVKELLGITIMERSSFEKNPIDFLEAKGYKEVKKDLIIKLPKYSLFELENGRKRMLASAGELQKGNELALPSKYVNFLYLASHYEKLKGSPEDNEQKQLFVEQHKHYLDEIIEQISEFSKRVILADANLDKVLSAYNKHRDKPIREQAENIIHLFTLTNLGAPAAFKYFDTTIDRKRYTSTKEVLDATLIHQSITGLYETRIDLSQLGGDGGEAAAKGSSGGGGGTLGIEDEYRLHETSTEPDVSLGSTWLSDFPQAWAETGGMGLAVRQAPLIIPLKATSTPVSIQQYPMSHEARLGIKPHIQRLLDQGILVPCQSPWNTPLLPVKKPGTNDYRPVQDLREVNKRVEDIHPTVPNPYNLLSGLPPSHQWYTVLDLKDAFFCLRLHPTSQPLFAFEWRDPGMGISGQLTWTRLPQGFKNSPTLFDEALHRDLADFRIQHPDLILLQYVDDILLAATSELDCQQGTRALLQTLGDLGYRASAKKAQICQKQVKYLGYLLREGQRWLTEARKETVMGQPVPKTPRQLREFLGTAGFCRLWIPGFAEMAAPLYPLTKTGTLFSWGPDQQKAYQEIKQALLTAPALGLPDLTKPFELFVDEKQGYAKGVLTQKLGPWRRPVAYLSKKLDPVAAGWPPCLRMVAAIAVLTKDAGKLTMGQPLVILAPHAVEALVKQPPDRWLSNARMTHYQAMLLDTDRVQFGPVVALNPATLLPLPEEGAPHDCLEILAETHGTRPDLTDQPIPDADHTWYTDGSSFLQEGQRKAGAAVTTETEVIWAGALPAGTSAQRAELIALTQALKMAEGKRLNVYTDSRYAFATAHIHGEIYRRRGLLTSEGREIKNKSEILALLKALFLPKRLSIIHCLGHQKGDSAEARGNRLADQAAREAAIKTPPDTSTLLAGKRTADGSEFEKRTADGSEFESPKKKAKVE

SEQ ID NO: 7342 - protein, 2096 aa, synthetic construct
MPAAKRVKLDGGDKKYSIGLDIGTNSVGWAVITDEYKVPSKKFKVLGNTDRHSIKKNLIGALLFDSGETAEATRLKRTARRRYTRRKNRICYLQEIFSNEMAKVDDSFFHRLEESFLVEEDKKHERHPIFGNIVDEVAYHEKYPTIYHLRKKLVDSTDKADLRLIYLALAHMIKFRGHFLIEGDLNPDNSDVDKLFIQLVQTYNQLFEENPINASGVDAKAILSARLSKSRRLENLIAQLPGEKKNGLFGNLIALSLGLTPNFKSNFDLAEDAKLQLSKDTYDDDLDNLLAQIGDQYADLFLAAKNLSDAILLSDILRVNTEITKAPLSASMIKRYDEHHQDLTLLKALVRQQLPEKYKEIFFDQSKNGYAGYIDGGASQEEFYKFIKPILEKMDGTEELLVKLNREDLLRKQRTFDNGSIPHQIHLGELHAILRRQEDFYPFLKDNREKIEKILTFRIPYYVGPLARGNSRFAWMTRKSEETITPWNFEEVVDKGASAQSFIERMTNFDKNLPNEKVLPKHSLLYEYFTVYNELTKVKYVTEGMRKPAFLSGEQKKAIVDLLFKTNRKVTVKQLKEDYFKKIECFDSVEISGVEDRFNASLGTYHDLLKIIKDKDFLDNEENEDILEDIVLTLTLFEDREMIEERLKTYAHLFDDKVMKQLKRRRYTGWGRLSRKLINGIRDKQSGKTILDFLKSDGFANRNFMQLIHDDSLTFKEDIQKAQVSGQGDSLHEHIANLAGSPAIKKGILQTVKVVDELVKVMGRHKPENIVIEMARENQTTQKGQKNSRERMKRIEEGIKELGSQILKEHPVENTQLQNEKLYLYYLQNGRDMYVDQELDINRLSDYDVDHIVPQSFLKDDSIDNKVLTRSDKARGKSDNVPSEEVVKKMKNYWRQLLNAKLITQRKFDNLTKAERGGLSELDKAGFIKRQLVETRQITKHVAQILDSRMNTKYDENDKLIREVKVITLKSKLVSDFRKDFQFYKVREINNYHHAHDAYLNAVVGTALIKKYPKLESEFVYGDYKVYDVRKMIAKSEQEIGKATAKYFFYSNIMNFFKTEITLANGEIRKRPLIETNGETGEIVWDKGRDFATVRKVLSMPQVNIVKKTEVQTGGFSKESILPKRNSDKLIARKKDWDPKKYGGFDSPTVAYSVLVVAKVEKGKSKKLKSVKELLGITIMERSSFEKNPIDFLEAKGYKEVKKDLIIKLPKYSLFELENGRKRMLASAGELQKGNELALPSKYVNFLYLASHYEKLKGSPEDNEQKQLFVEQHKHYLDEIIEQISEFSKRVILADANLDKVLSAYNKHRDKPIREQAENIIHLFTLTNLGAPAAFKYFDTTIDRKRYTSTKEVLDATLIHQSITGLYETRIDLSQLGGDGGEAAAKGSSGGGGGTLNIEDEYRLHETSKEPDVSLGSTWLSDFPQAWAETGGMGLAVRQAPLIIPLKATSTPVSIKQYPMSQEARLGIKPHIQRLLDQGILVPCQSPWNTPLLPVKKPGTNDYRPVQDLREVNKRVEDIHPTVPNPYNLLSGLPPSHQWYTVLDLKDAFFCLRLHPTSQPLFAFEWRDPEMGISGQLTWTRLPQGFKNSPTLFNEALHRDLAGFRIQHPDLILLQYVDDLLLAATSELDCQQGTRALLQTLGDLGYRASAKKAQICQKQVKYLGYLLKEGQRWLTEARKETVMGQPIPKTPRQLREFLGTAGFCRLWIPGFAEMAAPLYPLTKPGTLFNWGPDQQKAFQEIKQALLTAPALGLPDLTKPFELFVDEKQGYAKGVLTQKLGPWRRPVAYLSKKLDPVAAGWPPCLRMVAAIAVLTKDAGKLTMGQPLVILAPHAVEALVKQPPDRWLSNARMTHYQALLLDTDRVQFGPVVALNPATLLPLPEEGLQHDCLDILAEAHGTRSDLMDQPLPDADHTWYTDGSSFLQEGQRKAGAAVTTETEVIWARALPAGTSAQRAELIALTQALKMAEGKKLNVYTDSRYAFATAHIHGEIYRRRGWLTSEGKEIKNKDEILALLKALFLPKRLSIIHCPGHQKGNSAEARGNRMADQAAREVATRETPETSTLLAGKRTADGSEFEKRTADGSEFESPKKKAKVE

SEQ ID NO: 7343 - protein, 2096 aa, synthetic construct
MPAAKRVKLDGGDKKYSIGLDIGTNSVGWAVITDEYKVPSKKFKVLGNTDRHSIKKNLIGALLFDSGETAEATRLKRTARRRYTRRKNRICYLQEIFSNEMAKVDDSFFHRLEESFLVEEDKKHERHPIFGNIVDEVAYHEKYPTIYHLRKKLVDSTDKADLRLIYLALAHMIKFRGHFLIEGDLNPDNSDVDKLFIQLVQTYNQLFEENPINASGVDAKAILSARLSKSRRLENLIAQLPGEKKNGLFGNLIALSLGLTPNFKSNFDLAEDAKLQLSKDTYDDDLDNLLAQIGDQYADLFLAAKNLSDAILLSDILRVNTEITKAPLSASMIKRYDEHHQDLTLLKALVRQQLPEKYKEIFFDQSKNGYAGYIDGGASQEEFYKFIKPILEKMDGTEELLVKLNREDLLRKQRTFDNGSIPHQIHLGELHAILRRQEDFYPFLKDNREKIEKILTFRIPYYVGPLARGNSRFAWMTRKSEETITPWNFEEVVDKGASAQSFIERMTNFDKNLPNEKVLPKHSLLYEYFTVYNELTKVKYVTEGMRKPAFLSGEQKKAIVDLLFKTNRKVTVKQLKEDYFKKIECFDSVEISGVEDRFNASLGTYHDLLKIIKDKDFLDNEENEDILEDIVLTLTLFEDREMIEERLKTYAHLFDDKVMKQLKRRRYTGWGRLSRKLINGIRDKQSGKTILDFLKSDGFANRNFMQLIHDDSLTFKEDIQKAQVSGQGDSLHEHIANLAGSPAIKKGILQTVKVVDELVKVMGRHKPENIVIEMARENQTTQKGQKNSRERMKRIEEGIKELGSQILKEHPVENTQLQNEKLYLYYLQNGRDMYVDQELDINRLSDYDVDHIVPQSFLKDDSIDNKVLTRSDKARGKSDNVPSEEVVKKMKNYWRQLLNAKLITQRKFDNLTKAERGGLSELDKAGFIKRQLVETRQITKHVAQILDSRMNTKYDENDKLIREVKVITLKSKLVSDFRKDFQFYKVREINNYHHAHDAYLNAVVGTALIKKYPKLESEFVYGDYKVYDVRKMIAKSEQEIGKATAKYFFYSNIMNFFKTEITLANGEIRKRPLIETNGETGEIVWDKGRDFATVRKVLSMPQVNIVKKTEVQTGGFSKESILPKRNSDKLIARKKDWDPKKYGGFDSPTVAYSVLVVAKVEKGKSKKLKSVKELLGITIMERSSFEKNPIDFLEAKGYKEVKKDLIIKLPKYSLFELENGRKRMLASAGELQKGNELALPSKYVNFLYLASHYEKLKGSPEDNEQKQLFVEQHKHYLDEIIEQISEFSKRVILADANLDKVLSAYNKHRDKPIREQAENIIHLFTLTNLGAPAAFKYFDTTIDRKRYTSTKEVLDATLIHQSITGLYETRIDLSQLGGDGGEAAAKGSSGGGGGTLNIEDEHRLHETSKEPDVSLGSTWLSDFPQAWAETGGMGLAVRQAPLIIPLKATSTPVSIKQYPMSQEARLGIKPHIQRLLDQGILVPCQSPWNTPLLPVKKPGTNDYRPVQDLREVNKRVEDIHPTVPNPYNLLSGLPPSHQWYTVLDLKDAFFCLRLHPTSQPLFAFEWRDPEMGISGQLTWTRLPQGFKNSPTLFNEALHRDLADFRIQHPDLILLQYVDDLLLAATSELDCQQGTRALLQTLGNLGYRASAKKAQICQKQVKYLGYLLKEGQRWLTEARKETVMGQPTPKTPRQLREFLGTAGFCRLWIPGFAEMAAPLYPLTKPGTLFNWGPDQQKAYQEIKQALLTAPALGLPDLTKPFELFVDEKQGYAKGVLTQKLGPWRRPVAYLSKKLDPVAAGWPPCLRMVAAIAVLTKDAGKLTMGQPLVILAPHAVEALVKQPPDRWLSNARMTHYQALLLDTDRVQFGPVVALNPATLLPLPEEGLQHNCLDILAEAHGTRPDLTDQPLPDADHTWYTDGSSLLQEGQRKAGAAVTTETEVIWAKALPAGTSAQRAELIALTQALKMAEGKKLNVYTDSRYAFATAHIHGEIYRRRGWLTSEGKEIKNKDEILALLKALFLPKRLSIIHCPGHQKGHSAEARGNRMADQAARKAAITETPDTSTLLAGKRTADGSEFEKRTADGSEFESPKKKAKVE

SEQ ID NO: 7344 - protein, 2116 aa, synthetic construct
MPAAKRVKLDGGDKKYSIGLDIGTNSVGWAVITDEYKVPSKKFKVLGNTDRHSIKKNLIGALLFDSGETAEATRLKRTARRRYTRRKNRICYLQEIFSNEMAKVDDSFFHRLEESFLVEEDKKHERHPIFGNIVDEVAYHEKYPTIYHLRKKLVDSTDKADLRLIYLALAHMIKFRGHFLIEGDLNPDNSDVDKLFIQLVQTYNQLFEENPINASGVDAKAILSARLSKSRRLENLIAQLPGEKKNGLFGNLIALSLGLTPNFKSNFDLAEDAKLQLSKDTYDDDLDNLLAQIGDQYADLFLAAKNLSDAILLSDILRVNTEITKAPLSASMIKRYDEHHQDLTLLKALVRQQLPEKYKEIFFDQSKNGYAGYIDGGASQEEFYKFIKPILEKMDGTEELLVKLNREDLLRKQRTFDNGSIPHQIHLGELHAILRRQEDFYPFLKDNREKIEKILTFRIPYYVGPLARGNSRFAWMTRKSEETITPWNFEEVVDKGASAQSFIERMTNFDKNLPNEKVLPKHSLLYEYFTVYNELTKVKYVTEGMRKPAFLSGEQKKAIVDLLFKTNRKVTVKQLKEDYFKKIECFDSVEISGVEDRFNASLGTYHDLLKIIKDKDFLDNEENEDILEDIVLTLTLFEDREMIEERLKTYAHLFDDKVMKQLKRRRYTGWGRLSRKLINGIRDKQSGKTILDFLKSDGFANRNFMQLIHDDSLTFKEDIQKAQVSGQGDSLHEHIANLAGSPAIKKGILQTVKVVDELVKVMGRHKPENIVIEMARENQTTQKGQKNSRERMKRIEEGIKELGSQILKEHPVENTQLQNEKLYLYYLQNGRDMYVDQELDINRLSDYDVDHIVPQSFLKDDSIDNKVLTRSDKARGKSDNVPSEEVVKKMKNYWRQLLNAKLITQRKFDNLTKAERGGLSELDKAGFIKRQLVETRQITKHVAQILDSRMNTKYDENDKLIREVKVITLKSKLVSDFRKDFQFYKVREINNYHHAHDAYLNAVVGTALIKKYPKLESEFVYGDYKVYDVRKMIAKSEQEIGKATAKYFFYSNIMNFFKTEITLANGEIRKRPLIETNGETGEIVWDKGRDFATVRKVLSMPQVNIVKKTEVQTGGFSKESILPKRNSDKLIARKKDWDPKKYGGFDSPTVAYSVLVVAKVEKGKSKKLKSVKELLGITIMERSSFEKNPIDFLEAKGYKEVKKDLIIKLPKYSLFELENGRKRMLASAGELQKGNELALPSKYVNFLYLASHYEKLKGSPEDNEQKQLFVEQHKHYLDEIIEQISEFSKRVILADANLDKVLSAYNKHRDKPIREQAENIIHLFTLTNLGAPAAFKYFDTTIDRKRYTSTKEVLDATLIHQSITGLYETRIDLSQLGGDGGEAAAKGSSGGGGGVQEISDSRPMLHIYLNGRRFLGLLDTGADKTCIAGRDWPANWPIHQTESSLQGLGMACGVARSSQPLRWQHEDKSGIIHPFVIPTLPFTLWGRDIMKDIKVRLMTDSPDDSQDLMIGAIESNLFADQISWKSDQPVWLNQWPLKQEKLQALQQLVTEQLQLGHLEESNSPWNTPVFVIKKKSGKWRLLQDLRAVNATMHDMGALQPGLPSPVAVPKGWEIIIIDLQDCFFNIKLHPEDCKRFAFSVPSPNFKRPYQRFQWKVLPQGMKNSPTLCQKFVDKAILTVRDKYQDSYIVHYMDDILLAHPSRSIVDEILTSMIQALNKHGLVVSTEKIQKYDNLKYLGTHIQGDSVSYQKLQIRTDKLRTLNDFQKLLGNINWIRPFLKLTTGELKPLFEILNGDSNPISTRKLTPEACKALQLMNERLSTARVKRLDLSQPWSLCILKTEYTPTACLWQDGVVEWIHLPHISPKVITPYDIFCTQLIIKGRHRSKELFSKDPDYIVVPYTKVQFDLLLQEKEDWPISLLGFLGEVHFHLPKDPLLTFTLQTAIIFPHMTSTTPLEKGIVIFTDGSANGRSVTYIQGREPIIKENTQNTAQQAEIVAVITAFEEVSQPFNLYTDSKYVTGLFPEIETATLSPRTKIYTELKHLQRLIHKRQEKFYIGHIRGHTGLPGPLAQGNAYADSLTRILTAAGKRTADGSEFEKRTADGSEFESPKKKAKVE

SEQ ID NO: 7345 - protein, 2088 aa, synthetic construct
MPAAKRVKLDGGDKKYSIGLDIGTNSVGWAVITDEYKVPSKKFKVLGNTDRHSIKKNLIGALLFDSGETAEATRLKRTARRRYTRRKNRICYLQEIFSNEMAKVDDSFFHRLEESFLVEEDKKHERHPIFGNIVDEVAYHEKYPTIYHLRKKLVDSTDKADLRLIYLALAHMIKFRGHFLIEGDLNPDNSDVDKLFIQLVQTYNQLFEENPINASGVDAKAILSARLSKSRRLENLIAQLPGEKKNGLFGNLIALSLGLTPNFKSNFDLAEDAKLQLSKDTYDDDLDNLLAQIGDQYADLFLAAKNLSDAILLSDILRVNTEITKAPLSASMIKRYDEHHQDLTLLKALVRQQLPEKYKEIFFDQSKNGYAGYIDGGASQEEFYKFIKPILEKMDGTEELLVKLNREDLLRKQRTFDNGSIPHQIHLGELHAILRRQEDFYPFLKDNREKIEKILTFRIPYYVGPLARGNSRFAWMTRKSEETITPWNFEEVVDKGASAQSFIERMTNFDKNLPNEKVLPKHSLLYEYFTVYNELTKVKYVTEGMRKPAFLSGEQKKAIVDLLFKTNRKVTVKQLKEDYFKKIECFDSVEISGVEDRFNASLGTYHDLLKIIKDKDFLDNEENEDILEDIVLTLTLFEDREMIEERLKTYAHLFDDKVMKQLKRRRYTGWGRLSRKLINGIRDKQSGKTILDFLKSDGFANRNFMQLIHDDSLTFKEDIQKAQVSGQGDSLHEHIANLAGSPAIKKGILQTVKVVDELVKVMGRHKPENIVIEMARENQTTQKGQKNSRERMKRIEEGIKELGSQILKEHPVENTQLQNEKLYLYYLQNGRDMYVDQELDINRLSDYDVDHIVPQSFLKDDSIDNKVLTRSDKARGKSDNVPSEEVVKKMKNYWRQLLNAKLITQRKFDNLTKAERGGLSELDKAGFIKRQLVETRQITKHVAQILDSRMNTKYDENDKLIREVKVITLKSKLVSDFRKDFQFYKVREINNYHHAHDAYLNAVVGTALIKKYPKLESEFVYGDYKVYDVRKMIAKSEQEIGKATAKYFFYSNIMNFFKTEITLANGEIRKRPLIETNGETGEIVWDKGRDFATVRKVLSMPQVNIVKKTEVQTGGFSKESILPKRNSDKLIARKKDWDPKKYGGFDSPTVAYSVLVVAKVEKGKSKKLKSVKELLGITIMERSSFEKNPIDFLEAKGYKEVKKDLIIKLPKYSLFELENGRKRMLASAGELQKGNELALPSKYVNFLYLASHYEKLKGSPEDNEQKQLFVEQHKHYLDEIIEQISEFSKRVILADANLDKVLSAYNKHRDKPIREQAENIIHLFTLTNLGAPAAFKYFDTTIDRKRYTSTKEVLDATLIHQSITGLYETRIDLSQLGGDGGEAAAKGSSGGGGGLDDEYRLYSPLVKPDQNIQFWLEQFPQAWAETAGMGLAKQVPPQVIQLKASATPVSVRQYPLSKEAQEGIRPHVQRLIQQGILVPVQSPWNTPLLPVRKPGTNDYRPVQDLREVNKRVQDIHPTVPNPYNLLCALPPQRSWYTVLDLKDAFFCLRLHPTSQPLFAFEWRDPGTGRTGQLTWTRLPQGFKNSPTIFNEALHRDLANFRIQHPQVTLLQYVDDLLLAGATKQDCLEGTKALLLELSDLGYRASAKKAQICRREVTYLGYSLRDGQRWLTEARKKTVVQIPAPTTAKQVREFLGKAGFCRLFIPGFATLAAPLYPLTKPKGEFSWAPEHQKAFDAIKKALLSAPALALPDVTKPFTLYVDERKGVARGVLTQTLGPWRRPVAYLSKKLDPVASGWPVCLKAIAAVAILVKDADKLTLGQNITVIAPHALENIVRQPPDRWMTNARMTHYQSLLLTERVTFAPPAALNPATLLPEETDEPVTHDCHQLLIEETGVRKDLTDIPLTGEVLTWFTDGSSYVVEGKRMAGAAVVDGTRTIWASSLPEGTSAQKAELMALTQALRLAEGKSINIYTDSRYAFATAHVHGAIYKQRGWLTSAGREIKNKEEILSLLEALHLPKRLAIIHCPGHQKAKDPISRGNQMADRVAKQAAQGVNLLPAGKRTADGSEFEKRTADGSEFESPKKKAKVE

SEQ ID NO: 7346 - protein, 2088 aa, synthetic construct; identical to SEQ ID NO: 7345

SEQ ID NO: 7347 - protein, 2087 aa, synthetic construct
MPAAKRVKLDGGDKKYSIGLDIGTNSVGWAVITDEYKVPSKKFKVLGNTDRHSIKKNLIGALLFDSGETAEATRLKRTARRRYTRRKNRICYLQEIFSNEMAKVDDSFFHRLEESFLVEEDKKHERHPIFGNIVDEVAYHEKYPTIYHLRKKLVDSTDKADLRLIYLALAHMIKFRGHFLIEGDLNPDNSDVDKLFIQLVQTYNQLFEENPINASGVDAKAILSARLSKSRRLENLIAQLPGEKKNGLFGNLIALSLGLTPNFKSNFDLAEDAKLQLSKDTYDDDLDNLLAQIGDQYADLFLAAKNLSDAILLSDILRVNTEITKAPLSASMIKRYDEHHQDLTLLKALVRQQLPEKYKEIFFDQSKNGYAGYIDGGASQEEFYKFIKPILEKMDGTEELLVKLNREDLLRKQRTFDNGSIPHQIHLGELHAILRRQEDFYPFLKDNREKIEKILTFRIPYYVGPLARGNSRFAWMTRKSEETITPWNFEEVVDKGASAQSFIERMTNFDKNLPNEKVLPKHSLLYEYFTVYNELTKVKYVTEGMRKPAFLSGEQKKAIVDLLFKTNRKVTVKQLKEDYFKKIECFDSVEISGVEDRFNASLGTYHDLLKIIKDKDFLDNEENEDILEDIVLTLTLFEDREMIEERLKTYAHLFDDKVMKQLKRRRYTGWGRLSRKLINGIRDKQSGKTILDFLKSDGFANRNFMQLIHDDSLTFKEDIQKAQVSGQGDSLHEHIANLAGSPAIKKGILQTVKVVDELVKVMGRHKPENIVIEMARENQTTQKGQKNSRERMKRIEEGIKELGSQILKEHPVENTQLQNEKLYLYYLQNGRDMYVDQELDINRLSDYDVDHIVPQSFLKDDSIDNKVLTRSDKARGKSDNVPSEEVVKKMKNYWRQLLNAKLITQRKFDNLTKAERGGLSELDKAGFIKRQLVETRQITKHVAQILDSRMNTKYDENDKLIREVKVITLKSKLVSDFRKDFQFYKVREINNYHHAHDAYLNAVVGTALIKKYPKLESEFVYGDYKVYDVRKMIAKSEQEIGKATAKYFFYSNIMNFFKTEITLANGEIRKRPLIETNGETGEIVWDKGRDFATVRKVLSMPQVNIVKKTEVQTGGFSKESILPKRNSDKLIARKKDWDPKKYGGFDSPTVAYSVLVVAKVEKGKSKKLKSVKELLGITIMERSSFEKNPIDFLEAKGYKEVKKDLIIKLPKYSLFELENGRKRMLASAGELQKGNELALPSKYVNFLYLASHYEKLKGSPEDNEQKQLFVEQHKHYLDEIIEQISEFSKRVILADANLDKVLSAYNKHRDKPIREQAENIIHLFTLTNLGAPAAFKYFDTTIDRKRYTSTKEVLDATLIHQSITGLYETRIDLSQLGGDGGEAAAKGSSGGGGGIPWLMKKPLQLTTLVPLQEYEERLLKQTMLTGSYKEKLQSLFLKYDALWQHWENQVGHRRIKPHHIATGTVNPRPQKQYPINPKAKASIQTVINDLLKQGVLIQQNSIMNTPVYPVPKPDGKWRMVLDYREVNKTIPLIAAQNQHSAGILSSIFRGKYKTTLDLSNGFWAHSITPESYWLTAFTWLGQQYCWTRLPQGFLNSPALFNADVVDLLKEVPNVQVYVDDIYISHDDPREHLEQLEKVFSLLLNAGYVVSLKKSEIAQHEVEFLGFNITKEGRGLTETFKQKLLNITPPRDLKQLQSILGKLNFARNFIPNFSELVKPLYNIIATAPGKYITWTTDNSQQLQNIISMLNSAENLEERNPEVRLIMKVNTSPSAGYIRFYNEFAKRPIMYLNYVYTKAEVKFTNTEKLLTTIHKGLIKALDLGMGQEILVYSPIVSMTKIQKTPLPERKALPIRWITWMSYLEDPRIQFHYDKTLPELQQVPTVTDDIIAKIKHPSEFSMVFYTDGSAIKHPNVNKSHNAGMGIAQVQFKPEFTVINTWSIPLGDHTAQLAEVAAVEFACKKALKIDGPVLIVTDSFYVAESVNKELPYWQSNGFFNNKKKPLKHVSKWKSIADCIQLKPDIIIIHEKGHQPTASTFHTEGNNLADKLATQGSYVVNAGKRTADGSEFEKRTADGSEFESPKKKAKVE

SEQ ID NO: 7348 - protein, 2094 aa, synthetic construct
MPAAKRVKLDGGDKKYSIGLDIGTNSVGWAVITDEYKVPSKKFKVLGNTDRHSIKKNLIGALLFDSGETAEATRLKRTARRRYTRRKNRICYLQEIFSNEMAKVDDSFFHRLEESFLVEEDKKHERHPIFGNIVDEVAYHEKYPTIYHLRKKLVDSTDKADLRLIYLALAHMIKFRGHFLIEGDLNPDNSDVDKLFIQLVQTYNQLFEENPINASGVDAKAILSARLSKSRRLENLIAQLPGEKKNGLFGNLIALSLGLTPNFKSNFDLAEDAKLQLSKDTYDDDLDNLLAQIGDQYADLFLAAKNLSDAILLSDILRVNTEITKAPLSASMIKRYDEHHQDLTLLKALVRQQLPEKYKEIFFDQSKNGYAGYIDGGASQEEFYKFIKPILEKMDGTEELLVKLNREDLLRKQRTFDNGSIPHQIHLGELHAILRRQEDFYPFLKDNREKIEKILTFRIPYYVGPLARGNSRFAWMTRKSEETITPWNFEEVVDKGASAQSFIERMTNFDKNLPNEKVLPKHSLLYEYFTVYNELTKVKYVTEGMRKPAFLSGEQKKAIVDLLFKTNRKVTVKQLKEDYFKKIECFDSVEISGVEDRFNASLGTYHDLLKIIKDKDFLDNEENEDILEDIVLTLTLFEDREMIEERLKTYAHLFDDKVMKQLKRRRYTGWGRLSRKLINGIRDKQSGKTILDFLKSDGFANRNFMQLIHDDSLTFKEDIQKAQVSGQGDSLHEHIANLAGSPAIKKGILQTVKVVDELVKVMGRHKPENIVIEMARENQTTQKGQKNSRERMKRIEEGIKELGSQILKEHPVENTQLQNEKLYLYYLQNGRDMYVDQELDINRLSDYDVDHIVPQSFLKDDSIDNKVLTRSDKARGKSDNVPSEEVVKKMKNYWRQLLNAKLITQRKFDNLTKAERGGLSELDKAGFIKRQLVETRQITKHVAQILDSRMNTKYDENDKLIREVKVITLKSKLVSDFRKDFQFYKVREINNYHHAHDAYLNAVVGTALIKKYPKLESEFVYGDYKVYDVRKMIAKSEQEIGKATAKYFFYSNIMNFFKTEITLANGEIRKRPLIETNGETGEIVWDKGRDFATVRKVLSMPQVNIVKKTEVQTGGFSKESILPKRNSDKLIARKKDWDPKKYGGFDSPTVAYSVLVVAKVEKGKSKKLKSVKELLGITIMERSSFEKNPIDFLEAKGYKEVKKDLIIKLPKYSLFELENGRKRMLASAGELQKGNELALPSKYVNFLYLASHYEKLKGSPEDNEQKQLFVEQHKHYLDEIIEQISEFSKRVILADANLDKVLSAYNKHRDKPIREQAENIIHLFTLTNLGAPAAFKYFDTTIDRKRYTSTKEVLDATLIHQSITGLYETRIDLSQLGGDGGEAAAKGSSGGGGGVLNLEEEYRLHEKPVPSSIDPSWLQLFPTVWAERAGMGLANQVPPVVVELRSGASPVAVRQYPMSKEAREGIRPHIQRFLDLGVLVPCQSPWNTPLLPVKKPGTNDYRPVQDLREINKRVQDIHPTVPNPYNLLSSLPPSHTWYSVLDLKDAFFCLKLHPNSQPLFAFEWRDPEKGNTGQLTWTRLPQGFKNSPTLFDEALHRDLAPFRALNPQVVLLQYVDDLLVAAPTYRDCKEGTQKLLQELSKLGYRVSAKKAQLCQKEVTYLGYLLKEGKRWLTPARKATVMKIPPPTTPRQVREFLGTAGFCRLWIPGFASLAAPLYPLTKESIPFIWTEEHQKAFDRIKEALLSAPALALPDLTKPFTLYVDERAGVARGVLTQTLGPWRRPVAYLSKKLDPVASGWPTCLKAVAAVALLLKDADKLTLGQNVTVIASHSLESIVRQPPDRWMTNARMTHYQSLLLNERVSFAPPAVLNPATLLPVESEATPVHRCSEILAEETGTRRDLKDQPLPGVPAWYTDGSSFIAEGKRRAGAAIVDGKRTVWASSLPEGTSAQKAELVALTQALRLAEGKDINIYTDSRYAFATAHIHGAIYKQRGLLTSAGKDIKNKEEILALLEAIHLPKRVAIIHCPGHQKGNDPVATGNRRADEAAKQAALSTRVLAETTKPAGKRTADGSEFEKRTADGSEFESPKKKAKVE

SEQ ID NO: 7349 - protein, 2094 aa, synthetic construct
MPAAKRVKLDGGDKKYSIGLDIGTNSVGWAVITDEYKVPSKKFKVLGNTDRHSIKKNLIGALLFDSGETAEATRLKRTARRRYTRRKNRICYLQEIFSNEMAKVDDSFFHRLEESFLVEEDKKHERHPIFGNIVDEVAYHEKYPTIYHLRKKLVDSTDKADLRLIYLALAHMIKFRGHFLIEGDLNPDNSDVDKLFIQLVQTYNQLFEENPINASGVDAKAILSARLSKSRRLENLIAQLPGEKKNGLFGNLIALSLGLTPNFKSNFDLAEDAKLQLSKDTYDDDLDNLLAQIGDQYADLFLAAKNLSDAILLSDILRVNTEITKAPLSASMIKRYDEHHQDLTLLKALVRQQLPEKYKEIFFDQSKNGYAGYIDGGASQEEFYKFIKPILEKMDGTEELLVKLNREDLLRKQRTFDNGSIPHQIHLGELHAILRRQEDFYPFLKDNREKIEKILTFRIPYYVGPLARGNSRFAWMTRKSEETITPWNFEEVVDKGASAQSFIERMTNFDKNLPNEKVLPKHSLLYEYFTVYNELTKVKYVTEGMRKPAFLSGEQKKAIVDLLFKTNRKVTVKQLKEDYFKKIECFDSVEISGVEDRFNASLGTYHDLLKIIKDKDFLDNEENEDILEDIVLTLTLFEDREMIEERLKTYAHLFDDKVMKQLKRRRYTGWGRLSRKLINGIRDKQSGKTILDFLKSDGFANRNFMQLIHDDSLTFKEDIQKAQVSGQGDSLHEHIANLAGSPAIKKGILQTVKVVDELVKVMGRHKPENIVIEMARENQTTQKGQKNSRERMKRIEEGIKELGSQILKEHPVENTQLQNEKLYLYYLQNGRDMYVDQELDINRLSDYDVDHIVPQSFLKDDSIDNKVLTRSDKARGKSDNVPSEEVVKKMKNYWRQLLNAKLITQRKFDNLTKAERGGLSELDKAGFIKRQLVETRQITKHVAQILDSRMNTKYDENDKLIREVKVITLKSKLVSDFRKDFQFYKVREINNYHHAHDAYLNAVVGTALIKKYPKLESEFVYGDYKVYDVRKMIAKSEQEIGKATAKYFFYSNIMNFFKTEITLANGEIRKRPLIETNGETGEIVWDKGRDFATVRKVLSMPQVNIVKKTEVQTGGFSKESILPKRNSDKLIARKKDWDPKKYGGFDSPTVAYSVLVVAKVEKGKSKKLKSVKELLGITIMERSSFEKNPIDFLEAKGYKEVKKDLIIKLPKYSLFELENGRKRMLASAGELQKGNELALPSKYVNFLYLASHYEKLKGSPEDNEQKQLFVEQHKHYLDEIIEQISEFSKRVILADANLDKVLSAYNKHRDKPIREQAENIIHLFTLTNLGAPAAFKYFDTTIDRKRYTSTKEVLDATLIHQSITGLYETRIDLSQLGGDGGEAAAKGSSGGGGGVLNLEEEYRLHEKPVPSSIDPSWLQLFPTVWAERAGMGLANQVPPVVVELRSGASPVAVRQYPMSKEAREGIRPHIQRFLDLGVLVPCQSPWNTPLLPVKKPGTNDYRPVQDLREINKRVQDIHPTVPNPYNLLSSLPPSHTWYSVLDLKDAFFCLKLHPNSQPLFAFEWRDPEKGNTGQLTWTRLPQGFKNSPTLFNEALHRDLAPFRALNPQVVLLQYVDDLLVAAPTYRDCKEGTQKLLQELSKLGYRVSAKKAQLCQKEVTYLGYLLKEGKRWLTPARKATVMKIPPPTTPRQVREFLGTAGFCRLWIPGFASLAAPLYPLTKPSIPFIWTEEHQKAFDRIKEALLSAPALALPDLTKPFTLYVDERAGVARGVLTQTLGPWRRPVAYLSKKLDPVASGWPTCLKAVAAVALLLKDADKLTLGQNVTVIASHSLESIVRQPPDRWMTNARMTHYQSLLLNERVSFAPPAVLNPATLLPVESEATPVHRCSEILAEETGTRRDLKDQPLPGVPAWYTDGSSFIAEGKRRAGAAIVDGKRTVWASSLPEGTSAQKAELVALTQALRLAEGKDINIYTDSRYAFATAHIHGAIYKQRGWLTSAGKDIKNKEEILALLEAIHLPKRVAIIHCPGHQKGNDPVATGNRRADEAAKQAALSTRVLAETTKPAGKRTADGSEFEKRTADGSEFESPKKKAKVE

SEQ ID NO: 7350 - protein, 2096 aa, synthetic construct
MPAAKRVKLDGGDKKYSIGLDIGTNSVGWAVITDEYKVPSKKFKVLGNTDRHSIKKNLIGALLFDSGETAEATRLKRTARRRYTRRKNRICYLQEIFSNEMAKVDDSFFHRLEESFLVEEDKKHERHPIFGNIVDEVAYHEKYPTIYHLRKKLVDSTDKADLRLIYLALAHMIKFRGHFLIEGDLNPDNSDVDKLFIQLVQTYNQLFEENPINASGVDAKAILSARLSKSRRLENLIAQLPGEKKNGLFGNLIALSLGLTPNFKSNFDLAEDAKLQLSKDTYDDDLDNLLAQIGDQYADLFLAAKNLSDAILLSDILRVNTEITKAPLSASMIKRYDEHHQDLTLLKALVRQQLPEKYKEIFFDQSKNGYAGYIDGGASQEEFYKFIKPILEKMDGTEELLVKLNREDLLRKQRTFDNGSIPHQIHLGELHAILRRQEDFYPFLKDNREKIEKILTFRIPYYVGPLARGNSRFAWMTRKSEETITPWNFEEVVDKGASAQSFIERMTNFDKNLPNEKVLPKHSLLYEYFTVYNELTKVKYVTEGMRKPAFLSGEQKKAIVDLLFKTNRKVTVKQLKEDYFKKIECFDSVEISGVEDRFNASLGTYHDLLKIIKDKDFLDNEENEDILEDIVLTLTLFEDREMIEERLKTYAHLFDDKVMKQLKRRRYTGWGRLSRKLINGIRDKQSGKTILDFLKSDGFANRNFMQLIHDDSLTFKEDIQKAQVSGQGDSLHEHIANLAGSPAIKKGILQTVKVVDELVKVMGRHKPENIVIEMARENQTTQKGQKNSRERMKRIEEGIKELGSQILKEHPVENTQLQNEKLYLYYLQNGRDMYVDQELDINRLSDYDVDHIVPQSFLKDDSIDNKVLTRSDKARGKSDNVPSEEVVKKMKNYWRQLLNAKLITQRKFDNLTKAERGGLSELDKAGFIKRQLVETRQITKHVAQILDSRMNTKYDENDKLIREVKVITLKSKLVSDFRKDFQFYKVREINNYHHAHDAYLNAVVGTALIKKYPKLESEFVYGDYKVYDVRKMIAKSEQEIGKATAKYFFYSNIMNFFKTEITLANGEIRKRPLIETNGETGEIVWDKGRDFATVRKVLSMPQVNIVKKTEVQTGGFSKESILPKRNSDKLIARKKDWDPKKYGGFDSPTVAYSVLVVAKVEKGKSKKLKSVKELLGITIMERSSFEKNPIDFLEAKGYKEVKKDLIIKLPKYSLFELENGRKRMLASAGELQKGNELALPSKYVNFLYLASHYEKLKGSPEDNEQKQLFVEQHKHYLDEIIEQISEFSKRVILADANLDKVLSAYNKHRDKPIREQAENIIHLFTLTNLGAPAAFKYFDTTIDRKRYTSTKEVLDATLIHQSITGLYETRIDLSQLGGDGGEAAAKGSSGGGGGTLNIEDEYRLHETSKEPDVPLGSTWLSDFPQAWAETGGMGLAVRQAPLIIPLKATSTPVSIKQYPMSQEARLGIKPHIQRLLDQGILVPCQSPWNTPLLPVKKPGTNDYRPVQDLREVNKRVEDIHPTVPNPYNLLSGLPPSHQWYTVLDLKDAFFCLRLHPTSQPLFAFEWRDPEMGISGQLTWTRLPQGFKNSPTLFNEALHRDLADFRIQHPDLILLQYVDDLLLAATSEQDCQRGTRALLQTLGNLGYRASAKKAQICQKQVKYLGYLLKEGQRWLTEARKETVMGQPTPKTPRQLREFLGTAGFCRLWIPGFAEMAAPLYPLTKPGTLFNWGPDQQKAYQEIKQALLTAPALGLPDLTKPFELFVDEKQGYAKGVLTQKLGPWRRPVAYLSKKLDPVAAGWPPCLRMVAAIAVLTKDAGKLTMGQPLVILAPHAVEALVKQPPDRWLSNARMTHYQAMLLDTDRVQFGPVVALNPATLLPLPEKEAPHDCLEILAETHGTRPDLTDQPIPDADYTWYTDGSSFLQEGQRRAGAAVTTETEVIWARALPAGTSAQRAELIALTQALKMAEGKKLNVYTDSRYAFATAHVHGEIYRRRGWLTSEGREIKNKNEILALLKALFLPKRLSIIHCPGHQKGNSAEARGNRMADQAAREAAMKAVLETSTLLAGKRTADGSEFEKRTADGSEFESPKKKAKVE

SEQ ID NO: 7351 - protein, 2096 aa, synthetic construct
MPAAKRVKLDGGDKKYSIGLDIGTNSVGWAVITDEYKVPSKKFKVLGNTDRHSIKKNLIGALLFDSGETAEATRLKRTARRRYTRRKNRICYLQEIFSNEMAKVDDSFFHRLEESFLVEEDKKHERHPIFGNIVDEVAYHEKYPTIYHLRKKLVDSTDKADLRLIYLALAHMIKFRGHFLIEGDLNPDNSDVDKLFIQLVQTYNQLFEENPINASGVDAKAILSARLSKSRRLENLIAQLPGEKKNGLFGNLIALSLGLTPNFKSNFDLAEDAKLQLSKDTYDDDLDNLLAQIGDQYADLFLAAKNLSDAILLSDILRVNTEITKAPLSASMIKRYDEHHQDLTLLKALVRQQLPEKYKEIFFDQSKNGYAGYIDGGASQEEFYKFIKPILEKMDGTEELLVKLNREDLLRKQRTFDNGSIPHQIHLGELHAILRRQEDFYPFLKDNREKIEKILTFRIPYYVGPLARGNSRFAWMTRKSEETITPWNFEEVVDKGASAQSFIERMTNFDKNLPNEKVLPKHSLLYEYFTVYNELTKVKYVTEGMRKPAFLSGEQKKAIVDLLFKTNRKVTVKQLKEDYFKKIECFDSVEISGVEDRFNASLGTYHDLLKIIKDKDFLDNEENEDILEDIVLTLTLFEDREMIEERLKTYAHLFDDKVMKQLKRRRYTGWGRLSRKLINGIRDKQSGKTILDFLKSDGFANRNFMQLIHDDSLTFKEDIQKAQVSGQGDSLHEHIANLAGSPAIKKGILQTVKVVDELVKVMGRHKPENIVIEMARENQTTQKGQKNSRERMKRIEEGIKELGSQILKEHPVENTQLQNEKLYLYYLQNGRDMYVDQELDINRLSDYDVDHIVPQSFLKDDSIDNKVLTRSDKARGKSDNVPSEEVVKKMKNYWRQLLNAKLITQRKFDNLTKAERGGLSELDKAGFIKRQLVETRQITKHVAQILDSRMNTKYDENDKLIREVKVITLKSKLVSDFRKDFQFYKVREINNYHHAHDAYLNAVVGTALIKKYPKLESEFVYGDYKVYDVRKMIAKSEQEIGKATAKYFFYSNIMNFFKTEITLANGEIRKRPLIETNGETGEIVWDKGRDFATVRKVLSMPQVNIVKKTEVQTGGFSKESILPKRNSDKLIARKKDWDPKKYGGFDSPTVAYSVLVVAKVEKGKSKKLKSVKELLGITIMERSSFEKNPIDFLEAKGYKEVKKDLIIKLPKYSLFELENGRKRMLASAGELQKGNELALPSKYVNFLYLASHYEKLKGSPEDNEQKQLFVEQHKHYLDEIIEQISEFSKRVILADANLDKVLSAYNKHRDKPIREQAENIIHLFTLTNLGAPAAFKYFDTTIDRKRYTSTKEVLDATLIHQSITGLYETRIDLSQLGGDGGGGGGSSPAPGGTAPLEEEYRLFLEAPIQNVTLLEQWKREIPKVWAEINPPGLASTQAPIHVQLLSTALPVRVRQYPITLEAKRSLRETIRKFRAAGILRPVHSPWNTPLLPVRKSGTSEYRMVQDLREVNKRVETIHPTVPNPYTLLSLLPPDRIWYSVLDLKDAFFCIPLAPESQLIFAFEWADAEEGESGQLTWTRLPQGFKNSPTLFNEALNRDLQGFRLDHPSVSLLQYVDDLLIAADTQAACLSATRDLLMTLAELGYRVSGKKAQLCQEEVTYLGFKIHKGSRSLSNSRTQAILQIPVPKTKRQVREFLGKIGYCRLFIPGFAELAQPLYAATRPGNDPLVWGEKEEEAFQSLKLALTQPPALALPSLDKPFQLFVEETSGAAKGVLTQALGPWKRPVAYLSKRLDPVAAGWPRCLRAIAAAALLTREASKLTFGQDIEITSSHNLESLLRSPPDKWLTNARITQYQVLLLDPPRVRFKQTAALNPATLLPETDDTLPIHHCLDTLDSLTSTRPDLTDQPLAQAEATLFTDGSSYIRDGKRYAGAAVVTLDSVIWAEPLPIGTSAQKAELIALTKALEWSKDKSVNIYTDSRYAFATLHVHGMIYRERGWLTAGGKAIKNAPEILALLTAVWLPKRVAVMHCKGHQKDDAPTSTGNRRADEVAREVAIRPLSTQATISAGKRTADGSEFEKRTADGSEFESPKKKAKVE

SEQ ID NO: 7352 - protein, 2093 aa, synthetic construct
MPAAKRVKLDGGDKKYSIGLDIGTNSVGWAVITDEYKVPSKKFKVLGNTDRHSIKKNLIGALLFDSGETAEATRLKRTARRRYTRRKNRICYLQEIFSNEMAKVDDSFFHRLEESFLVEEDKKHERHPIFGNIVDEVAYHEKYPTIYHLRKKLVDSTDKADLRLIYLALAHMIKFRGHFLIEGDLNPDNSDVDKLFIQLVQTYNQLFEENPINASGVDAKAILSARLSKSRRLENLIAQLPGEKKNGLFGNLIALSLGLTPNFKSNFDLAEDAKLQLSKDTYDDDLDNLLAQIGDQYADLFLAAKNLSDAILLSDILRVNTEITKAPLSASMIKRYDEHHQDLTLLKALVRQQLPEKYKEIFFDQSKNGYAGYIDGGASQEEFYKFIKPILEKMDGTEELLVKLNREDLLRKQRTFDNGSIPHQIHLGELHAILRRQEDFYPFLKDNREKIEKILTFRIPYYVGPLARGNSRFAWMTRKSEETITPWNFEEVVDKGASAQSFIERMTNFDKNLPNEKVLPKHSLLYEYFTVYNELTKVKYVTEGMRKPAFLSGEQKKAIVDLLFKTNRKVTVKQLKEDYFKKIECFDSVEISGVEDRFNASLGTYHDLLKIIKDKDFLDNEENEDILEDIVLTLTLFEDREMIEERLKTYAHLFDDKVMKQLKRRRYTGWGRLSRKLINGIRDKQSGKTILDFLKSDGFANRNFMQLIHDDSLTFKEDIQKAQVSGQGDSLHEHIANLAGSPAIKKGILQTVKVVDELVKVMGRHKPENIVIEMARENQTTQKGQKNSRERMKRIEEGIKELGSQILKEHPVENTQLQNEKLYLYYLQNGRDMYVDQELDINRLSDYDVDHIVPQSFLKDDSIDNKVLTRSDKARGKSDNVPSEEVVKKMKNYWRQLLNAKLITQRKFDNLTKAERGGLSELDKAGFIKRQLVETRQITKHVAQILDSRMNTKYDENDKLIREVKVITLKSKLVSDFRKDFQFYKVREINNYHHAHDAYLNAVVGTALIKKYPKLESEFVYGDYKVYDVRKMIAKSEQEIGKATAKYFFYSNIMNFFKTEITLANGEIRKRPLIETNGETGEIVWDKGRDFATVRKVLSMPQVNIVKKTEVQTGGFSKESILPKRNSDKLIARKKDWDPKKYGGFDSPTVAYSVLVVAKVEKGKSKKLKSVKELLGITIMERSSFEKNPIDFLEAKGYKEVKKDLIIKLPKYSLFELENGRKRMLASAGELQKGNELALPSKYVNFLYLASHYEKLKGSPEDNEQKQLFVEQHKHYLDEIIEQISEFSKRVILADANLDKVLSAYNKHRDKPIREQAENIIHLFTLTNLGAPAAFKYFDTTIDRKRYTSTKEVLDATLIHQSITGLYETRIDLSQLGGDGGGGGGSSPAPGGTLQLEEEYRLFEPESTQKQEMDIWLKNFPQAWAETGGMGTAHCQAPVLIQLKATATPISIRQYPMPHEAYQGIKPHIRRMLDQGILKPCQSPWNTPLLPVKKPGTEDYRPVQDLREVNKRVEDIHPTVPNPYNLLSTLPPSHPWYTVLDLKDAFFCLRLHSESQLLFAFEWRDPEIGLSGQLTWTRLPQGFKNSPTLFNEALHSDLADFRVRYPALVLLQYVDDLLLAAATRTECLEGTKALLETLGNKGYRASAKKAQICLQEVTYLGYSLKDGQRWLTKARKEAILSIPVPKNSRQVREFLGKAGYCRLFIPGFAELAAPLYPLTRPGTLFQWGTEQQLAFEDIKKALLSSPALGLPDITKPFELFIDENSGFAKGVLVQKLGPWKRPVAYLSKKLDTVASGWPPCLRMVAAIAILVKDAGKLTLGQPLTILTSHPVEALVRQPPNKWLSNARMTHYQAMLLDAERVHFGPTVSLNPATLLPLPSGGNHHDCLQILAETHGTRPDLTDQPLPDADLTWYTDGSSFIRNGEREAGAAVTTESEVIWAAPLPPGTSAQRAELIALTQALKMAEGKKLTVYTDSRYAFATTHVHGEIYRRRGWLTSEGKEIKNKNEILALLEALFLPKRLSIIHCPGHQKGDSPQAKGNRLADDTAKKAATETHSSLTVLPAGKRTADGSEFEKRTADGSEFESPKKKAKVE

SEQ ID NO: 7353 - protein, 2216 aa, synthetic construct
MPAAKRVKLDGGDKKYSIGLDIGTNSVGWAVITDEYKVPSKKFKVLGNTDRHSIKKNLIGALLFDSGETAEATRLKRTARRRYTRRKNRICYLQEIFSNEMAKVDDSFFHRLEESFLVEEDKKHERHPIFGNIVDEVAYHEKYPTIYHLRKKLVDSTDKADLRLIYLALAHMIKFRGHFLIEGDLNPDNSDVDKLFIQLVQTYNQLFEENPINASGVDAKAILSARLSKSRRLENLIAQLPGEKKNGLFGNLIALSLGLTPNFKSNFDLAEDAKLQLSKDTYDDDLDNLLAQIGDQYADLFLAAKNLSDAILLSDILRVNTEITKAPLSASMIKRYDEHHQDLTLLKALVRQQLPEKYKEIFFDQSKNGYAGYIDGGASQEEFYKFIKPILEKMDGTEELLVKLNREDLLRKQRTFDNGSIPHQIHLGELHAILRRQEDFYPFLKDNREKIEKILTFRIPYYVGPLARGNSRFAWMTRKSEETITPWNFEEVVDKGASAQSFIERMTNFDKNLPNEKVLPKHSLLYEYFTVYNELTKVKYVTEGMRKPAFLSGEQKKAIVDLLFKTNRKVTVKQLKEDYFKKIECFDSVEISGVEDRFNASLGTYHDLLKIIKDKDFLDNEENEDILEDIVLTLTLFEDREMIEERLKTYAHLFDDKVMKQLKRRRYTGWGRLSRKLINGIRDKQSGKTILDFLKSDGFANRNFMQLIHDDSLTFKEDIQKAQVSGQGDSLHEHIANLAGSPAIKKGILQTVKVVDELVKVMGRHKPENIVIEMARENQTTQKGQKNSRERMKRIEEGIKELGSQILKEHPVENTQLQNEKLYLYYLQNGRDMYVDQELDINRLSDYDVDHIVPQSFLKDDSIDNKVLTRSDKARGKSDNVPSEEVVKKMKNYWRQLLNAKLITQRKFDNLTKAERGGLSELDKAGFIKRQLVETRQITKHVAQILDSRMNTKYDENDKLIREVKVITLKSKLVSDFRKDFQFYKVREINNYHHAHDAYLNAVVGTALIKKYPKLESEFVYGDYKVYDVRKMIAKSEQEIGKATAKYFFYSNIMNFFKTEITLANGEIRKRPLIETNGETGEIVWDKGRDFATVRKVLSMPQVNIVKKTEVQTGGFSKESILPKRNSDKLIARKKDWDPKKYGGFDSPTVAYSVLVVAKVEKGKSKKLKSVKELLGITIMERSSFEKNPIDFLEAKGYKEVKKDLIIKLPKYSLFELENGRKRMLASAGELQKGNELALPSKYVNFLYLASHYEKLKGSPEDNEQKQLFVEQHKHYLDEIIEQISEFSKRVILADANLDKVLSAYNKHRDKPIREQAENIIHLFTLTNLGAPAAFKYFDTTIDRKRYTSTKEVLDATLIHQSITGLYETRIDLSQLGGDGGGGGGSSPAPGGTLGDQGSRGSDPLPEPRVTLTVEGIPTEFLVNTGAEHSVLTKPMGKMGSKRTVVAGATGSKVYPWTTKRLLKIGQKQVTHSFLVIPECPAPLLGRDLLTKLKAQIQFSTEGPQVTWEDRPAMCLVLNLEEEYRLHEKPVPPSIDPSWLQLFPMVWAEKAGMGLANQVPPVVVELKSDASPVAVRQYPMSKEAREGIRPHIQRFLDLGILVPCQSPWNTPLLPVKKPGTNDYRPVQDLREVNKRVQDIHPTVPNPYNLLSSLPPSHTWYSVLDLKDAFFCLKLHPNSQPLFAFEWRDPEKGNTGQLTWTRLPQGFKNSPTLFDEALHRDLASFRALNPQVVMLQYVDDLLVAAPTYRDCKEGTRRLLQELSKLGYRVSAKKAQLCREEVTYLGYLLKGGKRWLTPARKATVMKIPTPTTPRQVREFLGTAGFCRLWIPGFASLAAPLYPLTREKVPFTWTEAHQEAFGRIKEALLSAPALALPDLTKPFALYVDEKEGVARGVLTQTLGPWRRPVAYLSKKLDPVASGWPTCLKAIAAVALLLKDADKLTLGQNVLVIAPHNLESIVRQPPDRWMTNARMTHYQSLLLNERVSFAPPAILNPATLLPVESDDTPIHICSEILAEETGTRPDLRDQPLPGVPAWYTDGSSFIMDGRRQAGAAIVDNKRTVWASNLPEGTSAQKAELIALTQALRLAEGKSINIYTDSRYAFATAHVHGAIYKQRGLLTSAGKDIKNKEEILALLEAIHLPKRVAIIHCPGHQRGTDPVATGNRKADEAAKQAAQSTRILTETTKNAGKRTADGSEFEKRTADGSEFESPKKKAKVE

SEQ ID NO: 7354 - protein, 2125 aa, synthetic construct
MPAAKRVKLDGGDKKYSIGLDIGTNSVGWAVITDEYKVPSKKFKVLGNTDRHSIKKNLIGALLFDSGETAEATRLKRTARRRYTRRKNRICYLQEIFSNEMAKVDDSFFHRLEESFLVEEDKKHERHPIFGNIVDEVAYHEKYPTIYHLRKKLVDSTDKADLRLIYLALAHMIKFRGHFLIEGDLNPDNSDVDKLFIQLVQTYNQLFEENPINASGVDAKAILSARLSKSRRLENLIAQLPGEKKNGLFGNLIALSLGLTPNFKSNFDLAEDAKLQLSKDTYDDDLDNLLAQIGDQYADLFLAAKNLSDAILLSDILRVNTEITKAPLSASMIKRYDEHHQDLTLLKALVRQQLPEKYKEIFFDQSKNGYAGYIDGGASQEEFYKFIKPILEKMDGTEELLVKLNREDLLRKQRTFDNGSIPHQIHLGELHAILRRQEDFYPFLKDNREKIEKILTFRIPYYVGPLARGNSRFAWMTRKSEETITPWNFEEVVDKGASAQSFIERMTNFDKNLPNEKVLPKHSLLYEYFTVYNELTKVKYVTEGMRKPAFLSGEQKKAIVDLLFKTNRKVTVKQLKEDYFKKIECFDSVEISGVEDRFNASLGTYHDLLKIIKDKDFLDNEENEDILEDIVLTLTLFEDREMIEERLKTYAHLFDDKVMKQLKRRRYTGWGRLSRKLINGIRDKQSGKTILDFLKSDGFANRNFMQLIHDDSLTFKEDIQKAQVSGQGDSLHEHIANLAGSPAIKKGILQTVKVVDELVKVMGRHKPENIVIEMARENQTTQKGQKNSRERMKRIEEGIKELGSQILKEHPVENTQLQNEKLYLYYLQNGRDMYVDQELDINRLSDYDVDHIVPQSFLKDDSIDNKVLTRSDKARGKSDNVPSEEVVKKMKNYWRQLLNAKLITQRKFDNLTKAERGGLSELDKAGFIKRQLVETRQITKHVAQILDSRMNTKYDENDKLIREVKVITLKSKLVSDFRKDFQFYKVREINNYHHAHDAYLNAVVGTALIKKYPKLESEFVYGDYKVYDVRKMIAKSEQEIGKATAKYFFYSNIMNFFKTEITLANGEIRKRPLIETNGETGEIVWDKGRDFATVRKVLSMPQVNIVKKTEVQTGGFSKESILPKRNSDKLIARKKDWDPKKYGGFDSPTVAYSVLVVAKVEKGKSKKLKSVKELLGITIMERSSFEKNPIDFLEAKGYKEVKKDLIIKLPKYSLFELENGRKRMLASAGELQKGNELALPSKYVNFLYLASHYEKLKGSPEDNEQKQLFVEQHKHYLDEIIEQISEFSKRVILADANLDKVLSAYNKHRDKPIREQAENIIHLFTLTNLGAPAAFKYFDTTIDRKRYTSTKEVLDATLIHQSITGLYETRIDLSQLGGDGGGGGGSSPAPGGLLGRDLLTKLKAQIQFSTEGPQVTWEDRPAMCLVLNLEEEYRLHEKPVPPSIDPSWLQLFPMVWAEKAGMGLANQVPPVVVELKSDASPVAVRQYPMSKEAREGIRPHIQRFLDLGILVPCQSPWNTPLLPVKKPGTNDYRPVQDLREVNKRVQDIHPTVPNPYNLLSSLPPSHTWYSVLDLKDAFFCLKLHPNSQPLFAFEWRDPEKGNTGQLTWTRLPQGFKNSPTLFNEALHRDLASFRALNPQVVMLQYVDDLLVAAPTYRDCKEGTRRLLQELSKLGYRVSAKKAQLCREEVTYLGYLLKGGKRWLTPARKATVMKIPTPTTPRQVREFLGTAGFCRLWIPGFASLAAPLYPLTRPKVPFTWTEAHQEAFGRIKEALLSAPALALPDLTKPFALYVDEKEGVARGVLTQTLGPWRRPVAYLSKKLDPVASGWPTCLKAIAAVALLLKDADKLTLGQNVLVIAPHNLESIVRQPPDRWMTNARMTHYQSLLLNERVSFAPPAILNPATLLPVESDDTPIHICSEILAEETGTRPDLRDQPLPGVPAWYTDGSSFIMDGRRQAGAAIVDNKRTVWASNLPEGTSAQKAELIALTQALRLAEGKSINIYTDSRYAFATAHVHGAIYKQRGWLTSAGKDIKNKEEILALLEAIHLPKRVAIIHCPGHQRGTDPVATGNRKADEAAKQAAQSTRILTETTKNAGKRTADGSEFEKRTADGSEFESPKKKAKVE

SEQ ID NO: 7355 - protein, 2216 aa, synthetic construct
MPAAKRVKLDGGDKKYSIGLDIGTNSVGWAVITDEYKVPSKKFKVLGNTDRHSIKKNLIGALLFDSGETAEATRLKRTARRRYTRRKNRICYLQEIFSNEMAKVDDSFFHRLEESFLVEEDKKHERHPIFGNIVDEVAYHEKYPTIYHLRKKLVDSTDKADLRLIYLALAHMIKFRGHFLIEGDLNPDNSDVDKLFIQLVQTYNQLFEENPINASGVDAKAILSARLSKSRRLENLIAQLPGEKKNGLFGNLIALSLGLTPNFKSNFDLAEDAKLQLSKDTYDDDLDNLLAQIGDQYADLFLAAKNLSDAILLSDILRVNTEITKAPLSASMIKRYDEHHQDLTLLKALVRQQLPEKYKEIFFDQSKNGYAGYIDGGASQEEFYKFIKPILEKMDGTEELLVKLNREDLLRKQRTFDNGSIPHQIHLGELHAILRRQEDFYPFLKDNREKIEKILTFRIPYYVGPLARGNSRFAWMTRKSEETITPWNFEEVVDKGASAQSFIERMTNFDKNLPNEKVLPKHSLLYEYFTVYNELTKVKYVTEGMRKPAFLSGEQKKAIVDLLFKTNRKVTVKQLKEDYFKKIECFDSVEISGVEDRFNASLGTYHDLLKIIKDKDFLDNEENEDILEDIVLTLTLFEDREMIEERLKTYAHLFDDKVMKQLKRRRYTGWGRLSRKLINGIRDKQSGKTILDFLKSDGFANRNFMQLIHDDSLTFKEDIQKAQVSGQGDSLHEHIANLAGSPAIKKGILQTVKVVDELVKVMGRHKPENIVIEMARENQTTQKGQKNSRERMKRIEEGIKELGSQILKEHPVENTQLQNEKLYLYYLQNGRDMYVDQELDINRLSDYDVDHIVPQSFLKDDSIDNKVLTRSDKARGKSDNVPSEEVVKKMKNYWRQLLNAKLITQRKFDNLTKAERGGLSELDKAGFIKRQLVETRQITKHVAQILDSRMNTKYDENDKLIREVKVITLKSKLVSDFRKDFQFYKVREINNYHHAHDAYLNAVVGTALIKKYPKLESEFVYGDYKVYDVRKMIAKSEQEIGKATAKYFFYSNIMNFFKTEITLANGEIRKRPLIETNGETGEIVWDKGRDFATVRKVLSMPQVNIVKKTEVQTGGFSKESILPKRNSDKLIARKKDWDPKKYGGFDSPTVAYSVLVVAKVEKGKSKKLKSVKELLGITIMERSSFEKNPIDFLEAKGYKEVKKDLIIKLPKYSLFELENGRKRMLASAGELQKGNELALPSKYVNFLYLASHYEKLKGSPEDNEQKQLFVEQHKHYLDEIIEQISEFSKRVILADANLDKVLSAYNKHRDKPIREQAENIIHLFTLTNLGAPAAFKYFDTTIDRKRYTSTKEVLDATLIHQSITGLYETRIDLSQLGGDGGGGGGSSPAPGGTLGDQGSRGSDPLPEPRVTLTVEGIPTEFLVNTGAEHSVLTKPMGKMGSKRTVVAGATGSKVYPWTTKRLLKIGQKQVTHSFLVIPECPAPLLGRDLLTKLKAQIQFSTEGPQVTWEDRPAMCLVLNLEEEYRLHEKPVPPSIDPSWLQLFPMVWAEKAGMGLANQVPPVVVELKSDASPVAVRQYPMSKEAREGIRPHIQRFLDLGILVPCQSPWNTPLLPVKKPGTNDYRPVQDLREVNKRVQDIHPTVPNPYNLLSSLPPSHTWYSVLDLKDAFFCLKLHPNSQPLFAFEWRDPEKGNTGQLTWTRLPQGFKNSPTLFNEALHRDLASFRALNPQVVMLQYVDDLLVAAPTYRDCKEGTRRLLQELSKLGYRVSAKKAQLCREEVTYLGYLLKGGKRWLTPARKATVMKIPTPTTPRQVREFLGTAGFCRLWIPGFASLAAPLYPLTRPKVPFTWTEAHQEAFGRIKEALLSAPALALPDLTKPFALYVDEKEGVARGVLTQTLGPWRRPVAYLSKKLDPVASGWPTCLKAIAAVALLLKDADKLTLGQNVLVIAPHNLESIVRQPPDRWMTNARMTHYQSLLLNERVSFAPPAILNPATLLPVESDDTPIHICSEILAEETGTRPDLRDQPLPGVPAWYTDGSSFIMDGRRQAGAAIVDNKRTVWASNLPEGTSAQKAELIALTQALRLAEGKSINIYTDSRYAFATAHVHGAIYKQRGWLTSAGKDIKNKEEILALLEAIHLPKRVAIIHCPGHQRGTDPVATGNRKADEAAKQAAQSTRILTETTKNAGKRTADGSEFEKRTADGSEFESPKKKAKVE

SEQ ID NO: 7356 - protein, 2094 aa, synthetic construct
MPAAKRVKLDGGDKKYSIGLDIGTNSVGWAVITDEYKVPSKKFKVLGNTDRHSIKKNLIGALLFDSGETAEATRLKRTARRRYTRRKNRICYLQEIFSNEMAKVDDSFFHRLEESFLVEEDKKHERHPIFGNIVDEVAYHEKYPTIYHLRKKLVDSTDKADLRLIYLALAHMIKFRGHFLIEGDLNPDNSDVDKLFIQLVQTYNQLFEENPINASGVDAKAILSARLSKSRRLENLIAQLPGEKKNGLFGNLIALSLGLTPNFKSNFDLAEDAKLQLSKDTYDDDLDNLLAQIGDQYADLFLAAKNLSDAILLSDILRVNTEITKAPLSASMIKRYDEHHQDLTLLKALVRQQLPEKYKEIFFDQSKNGYAGYIDGGASQEEFYKFIKPILEKMDGTEELLVKLNREDLLRKQRTFDNGSIPHQIHLGELHAILRRQEDFYPFLKDNREKIEKILTFRIPYYVGPLARGNSRFAWMTRKSEETITPWNFEEVVDKGASAQSFIERMTNFDKNLPNEKVLPKHSLLYEYFTVYNELTKVKYVTEGMRKPAFLSGEQKKAIVDLLFKTNRKVTVKQLKEDYFKKIECFDSVEISGVEDRFNASLGTYHDLLKIIKDKDFLDNEENEDILEDIVLTLTLFEDREMIEERLKTYAHLFDDKVMKQLKRRRYTGWGRLSRKLINGIRDKQSGKTILDFLKSDGFANRNFMQLIHDDSLTFKEDIQKAQVSGQGDSLHEHIANLAGSPAIKKGILQTVKVVDELVKVMGRHKPENIVIEMARENQTTQKGQKNSRERMKRIEEGIKELGSQILKEHPVENTQLQNEKLYLYYLQNGRDMYVDQELDINRLSDYDVDHIVPQSFLKDDSIDNKVLTRSDKARGKSDNVPSEEVVKKMKNYWRQLLNAKLITQRKFDNLTKAERGGLSELDKAGFIKRQLVETRQITKHVAQILDSRMNTKYDENDKLIREVKVITLKSKLVSDFRKDFQFYKVREINNYHHAHDAYLNAVVGTALIKKYPKLESEFVYGDYKVYDVRKMIAKSEQEIGKATAKYFFYSNIMNFFKTEITLANGEIRKRPLIETNGETGEIVWDKGRDFATVRKVLSMPQVNIVKKTEVQTGGFSKESILPKRNSDKLIARKKDWDPKKYGGFDSPTVAYSVLVVAKVEKGKSKKLKSVKELLGITIMERSSFEKNPIDFLEAKGYKEVKKDLIIKLPKYSLFELENGRKRMLASAGELQKGNELALPSKYVNFLYLASHYEKLKGSPEDNEQKQLFVEQHKHYLDEIIEQISEFSKRVILADANLDKVLSAYNKHRDKPIREQAENIIHLFTLTNLGAPAAFKYFDTTIDRKRYTSTKEVLDATLIHQSITGLYETRIDLSQLGGDGGGGGGSSPAPGGTLNLEDEYRLYETSAEPEVSPGSTWLSDFPQAWAETGGMGLAVRQAPLIIPLKATSTPVSIKQYPMSQEAKLGIKPHIQRLLDQGILVPCQSPWNTPLLPVKKPGTNDYRPVQDLREVNKRVEDIHPTVPNPYNLLSGLPPSHRWYTVLDLKDAFFCLRLHPTSQPLFAFEWRDPGMGISGQLTWTRLPQGFKNSPTLFNEALHRDLADFRIQHPDLILLQYVDDILLAATSELDCQQGTRALLLTLGNLGYRASAKKAQLCQKQVKYLGYLLKEGQRWLTEARKETVMGQPTPKTPRQLREFLGTAGFCRLWIPGFAEMAAPLYPLTKPGTLFNWGPDQQKAYQEIKQALLTAPALGLPDLTKPFELFVDEKQGYAKGVLTQKLGPWRRPVAYLSKKLDPVAAGWPPCLRMVAAIAVLRKDAGKLTMGQPLVILAPHAVEALVKQPPDRWLSNARMTHYQAMLLDTDRVQFGPVVALNPATLLPLPEEGAPHDCLEILAETHGTRPDLTDQPIPDADHTWYTDGSSFLQEGQRKAGAAVTTETEVIWARALPAGTSAQRAELIALTQALKMAEGKRLNVYTDSRYAFATAHIHGEIYRRRGWLTSEGREIKNKSEILALLKALFLPKRLSIIHCLGHQKGDSAEARGNRLADQAAREAAIKTPPDTSTLLAGKRTADGSEFEKRTADGSEFESPKKKAKVE

SEQ ID NO: 7357 - protein, 2094 aa, synthetic construct
MPAAKRVKLDGGDKKYSIGLDIGTNSVGWAVITDEYKVPSKKFKVLGNTDRHSIKKNLIGALLFDSGETAEATRLKRTARRRYTRRKNRICYLQEIFSNEMAKVDDSFFHRLEESFLVEEDKKHERHPIFGNIVDEVAYHEKYPTIYHLRKKLVDSTDKADLRLIYLALAHMIKFRGHFLIEGDLNPDNSDVDKLFIQLVQTYNQLFEENPINASGVDAKAILSARLSKSRRLENLIAQLPGEKKNGLFGNLIALSLGLTPNFKSNFDLAEDAKLQLSKDTYDDDLDNLLAQIGDQYADLFLAAKNLSDAILLSDILRVNTEITKAPLSASMIKRYDEHHQDLTLLKALVRQQLPEKYKEIFFDQSKNGYAGYIDGGASQEEFYKFIKPILEKMDGTEELLVKLNREDLLRKQRTFDNGSIPHQIHLGELHAILRRQEDFYPFLKDNREKIEKILTFRIPYYVGPLARGNSRFAWMTRKSEETITPWNFEEVVDKGASAQSFIERMTNFDKNLPNEKVLPKHSLLYEYFTVYNELTKVKYVTEGMRKPAFLSGEQKKAIVDLLFKTNRKVTVKQLKEDYFKKIECFDSVEISGVEDRFNASLGTYHDLLKIIKDKDFLDNEENEDILEDIVLTLTLFEDREMIEERLKTYAHLFDDKVMKQLKRRRYTGWGRLSRKLINGIRDKQSGKTILDFLKSDGFANRNFMQLIHDDSLTFKEDIQKAQVSGQGDSLHEHIANLAGSPAIKKGILQTVKVVDELVKVMGRHKPENIVIEMARENQTTQKGQKNSRERMKRIEEGIKELGSQILKEHPVENTQLQNEKLYLYYLQNGRDMYVDQELDINRLSDYDVDHIVPQSFLKDDSIDNKVLTRSDKARGKSDNVPSEEVVKKMKNYWRQLLNAKLITQRKFDNLTKAERGGLSELDKAGFIKRQLVETRQITKHVAQILDSRMNTKYDENDKLIREVKVITLKSKLVSDFRKDFQFYKVREINNYHHAHDAYLNAVVGTALIKKYPKLESEFVYGDYKVYDVRKMIAKSEQEIGKATAKYFFYSNIMNFFKTEITLANGEIRKRPLIETNGETGEIVWDKGRDFATVRKVLSMPQVNIVKKTEVQTGGFSKESILPKRNSDKLIARKKDWDPKKYGGFDSPTVAYSVLVVAKVEKGKSKKLKSVKELLGITIMERSSFEKNPIDFLEAKGYKEVKKDLIIKLPKYSLFELENGRKRMLASAGELQKGNELALPSKYVNFLYLASHYEKLKGSPEDNEQKQLFVEQHKHYLDEIIEQISEFSKRVILADANLDKVLSAYNKHRDKPIREQAENIIHLFTLTNLGAPAAFKYFDTTIDRKRYTSTKEVLDATLIHQSITGLYETRIDLSQLGGDGGGGGGSSPAPGGLGIEDEYRLHETSTEPDVSLGSTWLSDFPQAWAETGGMGLAVRQAPLIIPLKATSTPVSIQQYPMSHEARLGIKPHIQRLLDQGILVPCQSPWNTPLLPVKKPGTNDYRPVQDLREVNKRVEDIHPTVPNPYNLLSGLPPSHQWYTVLDLKDAFFCLRLHPTSQPLFAFEWRDPGMGISGQLTWTRLPQGFKNSPTLFNEALHRDLADFRIQHPDLILLQYVDDILLAATSELDCQQGTRALLQTLGDLGYRASAKKAQICQKQVKYLGYLLREGQRWLTEARKETVMGQPVPKTPRQLREFLGKAGFCRLFIPGFAEMAAPLYPLTKPGTLFSWGPDQQKAYQEIKQALLTAPALGLPDLTKPFELFVDEKQGYAKGVLTQKLGPWRRPVAYLSKKLDPVAAGWPPCLRMVAAIAVLTKDAGKLTMGQPLVILAPHAVEALVKQPPDRWLSNARMTHYQAMLLDTDRVQFGPVVALNPATLLPLPEEGAPHDCLEILAETHGTRPDLTDQPIPDADHTWYTDGSSFLQEGQRKAGAAVTTETEVIWAGALPAGTSAQRAELIALTQALKMAEGKRLNVYTDSRYAFATAHIHGEIYRRRGWLTSEGREIKNKSEILALLKALFLPKRLSIIHCLGHQKGDSAEARGNRLADQAAREAAIKTPPDTSTLLIAGKRTADGSEFEKRTADGSEFESPKKKAKVE

SEQ ID NO: 7358 - protein, 2094 aa, synthetic construct; identical to SEQ ID NO: 7357

SEQ ID NO: 7359 - protein, 2094 aa, synthetic construct
MPAAKRVKLDGGDKKYSIGLDIGTNSVGWAVITDEYKVPSKKFKVLGNTDRHSIKKNLIGALLFDSGETAEATRLKRTARRRYTRRKNRICYLQEIFSNEMAKVDDSFFHRLEESFLVEEDKKHERHPIFGNIVDEVAYHEKYPTIYHLRKKLVDSTDKADLRLIYLALAHMIKFRGHFLIEGDLNPDNSDVDKLFIQLVQTYNQLFEENPINASGVDAKAILSARLSKSRRLENLIAQLPGEKKNGLFGNLIALSLGLTPNFKSNFDLAEDAKLQLSKDTYDDDLDNLLAQIGDQYADLFLAAKNLSDAILLSDILRVNTEITKAPLSASMIKRYDEHHQDLTLLKALVRQQLPEKYKEIFFDQSKNGYAGYIDGGASQEEFYKFIKPILEKMDGTEELLVKLNREDLLRKQRTFDNGSIPHQIHLGELHAILRRQEDFYPFLKDNREKIEKILTFRIPYYVGPLARGNSRFAWMTRKSEETITPWNFEEVVDKGASAQSFIERMTNFDKNLPNEKVLPKHSLLYEYFTVYNELTKVKYVTEGMRKPAFLSGEQKKAIVDLLFKTNRKVTVKQLKEDYFKKIECFDSVEISGVEDRFNASLGTYHDLLKIIKDKDFLDNEENEDILEDIVLTLTLFEDREMIEERLKTYAHLFDDKVMKQLKRRRYTGWGRLSRKLINGIRDKQSGKTILDFLKSDGFANRNFMQLIHDDSLTFKEDIQKAQVSGQGDSLHEHIANLAGSPAIKKGILQTVKVVDELVKVMGRHKPENIVIEMARENQTTQKGQKNSRERMKRIEEGIKELGSQILKEHPVENTQLQNEKLYLYYLQNGRDMYVDQELDINRLSDYDVDHIVPQSFLKDDSIDNKVLTRSDKARGKSDNVPSEEVVKKMKNYWRQLLNAKLITQRKFDNLTKAERGGLSELDKAGFIKRQLVETRQITKHVAQILDSRMNTKYDENDKLIREVKVITLKSKLVSDFRKDFQFYKVREINNYHHAHDAYLNAVVGTALIKKYPKLESEFVYGDYKVYDVRKMIAKSEQEIGKATAKYFFYSNIMNFFKTEITLANGEIRKRPLIETNGETGEIVWDKGRDFATVRKVLSMPQVNIVKKTEVQTGGFSKESILPKRNSDKLIARKKDWDPKKYGGFDSPTVAYSVLVVAKVEKGKSKKLKSVKELLGITIMERSSFEKNPIDFLEAKGYKEVKKDLIIKLPKYSLFELENGRKRMLASAGELQKGNELALPSKYVNFLYLASHYEKLKGSPEDNEQKQLFVEQHKHYLDEIIEQISEFSKRVILADANLDKVLSAYNKHRDKPIREQAENIIHLFTLTNLGAPAAFKYFDTTIDRKRYTSTKEVLDATLIHQSITGLYETRIDLSQLGGDGGGGGGSSPAPGGTLNIEDEYRLHETSKEPDVSLGSTWLSDFPQAWAETGGMGLAVRQAPLIIPLKATSTPVSIKQYPMSQEARLGIKPHIQRLLDQGILVPCQSPWNTPLLPVKKPGTNDYRPVQDLREVNKRVEDIHPTVPNPYNLLSGLPPSHQWYTVLDLKDAFFCLRLHPTSQPLFAFEWRDPEMGISGQLTWTRLPQGFKNSPTLFNEALHRDLAGFRIQHPDLILLQYVDDLLLAATSELDCQQGTRALLQTLGDLGYRASAKKAQICQKQVKYLGYLLKEGQRWLTEARKETVMGQPIPKTPRQLREFLGTAGFCRLWIPGFAEMAAPLYPLTKPGTLFNWGPDQQKAFQEIKQALLTAPALGLPDLTKPFELFVDEKQGYAKGVLTQKLGPWRRPVAYLSKKLDPVAAGWPPCLRMVAAIAVLTKDAGKLTMGQPLVILAPHAVEALVKQPPDRWLSNARMTHYQALLLDTDRVQFGPVVALNPATLLPLPEEGLQHDCLDILAEAHGTRSDLMDQPLPDADHTWYTDGSSFLQEGQRKAGAAVTTETEVIWARALPAGTSAQRAELIALTQALKMAEGKKLNVYTDSRYAFATAHIHGEIYRRRGWLTSEGKEIKNKDEILALLKALFLPKRLSIIHCPGHQKGNSAEARGNRMADQAAREVATRETPETSTLLAGKRTADGSEFEKRTADGSEFESPKKKAKVE

SEQ ID NO: 7360 - protein, 2094 aa, synthetic construct
MPAAKRVKLDGGDKKYSIGLDIGTNSVGWAVITDEYKVPSKKFKVLGNTDRHSIKKNLIGALLFDSGETAEATRLKRTARRRYTRRKNRICYLQEIFSNEMAKVDDSFFHRLEESFLVEEDKKHERHPIFGNIVDEVAYHEKYPTIYHLRKKLVDSTDKADLRLIYLALAHMIKFRGHFLIEGDLNPDNSDVDKLFIQLVQTYNQLFEENPINASGVDAKAILSARLSKSRRLENLIAQLPGEKKNGLFGNLIALSLGLTPNFKSNFDLAEDAKLQLSKDTYDDDLDNLLAQIGDQYADLFLAAKNLSDAILLSDILRVNTEITKAPLSASMIKRYDEHHQDLTLLKALVRQQLPEKYKEIFFDQSKNGYAGYIDGGASQEEFYKFIKPILEKMDGTEELLVKLNREDLLRKQRTFDNGSIPHQIHLGELHAILRRQEDFYPFLKDNREKIEKILTFRIPYYVGPLARGNSRFAWMTRKSEETITPWNFEEVVDKGASAQSFIERMTNFDKNLPNEKVLPKHSLLYEYFTVYNELTKVKYVTEGMRKPAFLSGEQKKAIVDLLFKTNRKVTVKQLKEDYFKKIECFDSVEISGVEDRFNASLGTYHDLLKIIKDKDFLDNEENEDILEDIVLTLTLFEDREMIEERLKTYAHLFDDKVMKQLKRRRYTGWGRLSRKLINGIRDKQSGKTILDFLKSDGFANRNFMQLIHDDSLTFKEDIQKAQVSGQGDSLHEHIANLAGSPAIKKGILQTVKVVDELVKVMGRHKPENIVIEMARENQTTQKGQKNSRERMKRIEEGIKELGSQILKEHPVENTQLQNEKLYLYYLQNGRDMYVDQELDINRLSDYDVDHIVPQSFLKDDSIDNKVLTRSDKARGKSDNVPSEEVVKKMKNYWRQLLNAKLITQRKFDNLTKAERGGLSELDKAGFIKRQLVETRQITKHVAQILDSRMNTKYDENDKLIREVKVITLKSKLVSDFRKDFQFYKVREINNYHHAHDAYLNAVVGTALIKKYPKLESEFVYGDYKVYDVRKMIAKSEQEIGKATAKYFFYSNIMNFFKTEITLANGEIRKRPLIETNGETGEIVWDKGRDFATVRKVLSMPQVNIVKKTEVQTGGFSKESILPKRNSDKLIARKKDWDPKKYGGFDSPTVAYSVLVVAKVEKGKSKKLKSVKELLGITIMERSSFEKNPIDFLEAKGYKEVKKDLIIKLPKYSLFELENGRKRMLASAGELQKGNELALPSKYVNFLYLASHYEKLKGSPEDNEQKQLFVEQHKHYLDEIIEQISEFSKRVILADANLDKVLSAYNKHRDKPIREQAENIIHLFTLTNLGAPAAFKYFDTTIDRKRYTSTKEVLDATLIHQSITGLYETRIDLSQLGGDGGGGGGSSPAPGGTLNIEDEYRLHETSKGPDVPLGSTWLSDFPQAWAETGGMGLAVRQAPLIIPLKATSTPVSIKQYPMSQEARLGIKPHIQRLLDQGILVPCQSPWNTPLLPVKKPGTNDYRPVQDLREVNKRVEDIHPTVPNPYNLLSGLPPSHQWYTVLDLKDAFFCLRLHPTSQSLFAFEWRDPEMGISGQLTWTRLPQGFKNSPTLFNEALHRDLADFRIQHPDLILLQYVDDLLLAATSELDCQQGTRALLQTLGDLGYRASAKKAQICQKQVKYLGYLLKEGQRWLTEARKETVMGQPTPKTPRQLREFLGTAGFCRLWIPGFAEMAAPLYPLTKPGTLFEWGPDQQKAYQEIKQALLTAPALGLPDLTKPFELFVDEKQGYAKGVLTQKLGPWRRPVAYLSKKLDPVAAGWPPCLRMVAAIAVLTKDAGKLTMGQPLVILAPHAVEALVKQPPDRWLSNARMTHYQALLLDTDRVQFGPIVALNPATLLPLPEEGLQHDCLDILAEAHGTRPDLTDQPLPDADHTWYTDGSSFLQEGQRKAGAAVTTETEVVWAKALPAGTSAQRAELIALTQALKMAEGKKLNVYTDSRYAFATAHIHGEIYRRRGWLTSEGKEIKNKDEILALLKALFLPKRLSIIHCPGHQKGNRAEARGNRMADQAAREVATRETPETSTLLAGKRTADGSEFEKRTADGSEFESPKKKAKVE

SEQ ID NO: 7361 - protein, 2088 aa, synthetic construct
MPAAKRVKLDGGDKKYSIGLDIGTNSVGWAVITDEYKVPSKKFKVLGNTDRHSIKKNLIGALLFDSGETAEATRLKRTARRRYTRRKNRICYLQEIFSNEMAKVDDSFFHRLEESFLVEEDKKHERHPIFGNIVDEVAYHEKYPTIYHLRKKLVDSTDKADLRLIYLALAHMIKFRGHFLIEGDLNPDNSDVDKLFIQLVQTYNQLFEENPINASGVDAKAILSARLSKSRRLENLIAQLPGEKKNGLFGNLIALSLGLTPNFKSNFDLAEDAKLQLSKDTYDDDLDNLLAQIGDQYADLFLAAKNLSDAILLSDILRVNTEITKAPLSASMIKRYDEHHQDLTLLKALVRQQLPEKYKEIFFDQSKNGYAGYIDGGASQEEFYKFIKPILEKMDGTEELLVKLNREDLLRKQRTFDNGSIPHQIHLGELHAILRRQEDFYPFLKDNREKIEKILTFRIPYYVGPLARGNSRFAWMTRKSEETITPWNFEEVVDKGASAQSFIERMTNFDKNLPNEKVLPKHSLLYEYFTVYNELTKVKYVTEGMRKPAFLSGEQKKAIVDLLFKTNRKVTVKQLKEDYFKKIECFDSVEISGVEDRFNASLGTYHDLLKIIKDKDFLDNEENEDILEDIVLTLTLFEDREMIEERLKTYAHLFDDKVMKQLKRRRYTGWGRLSRKLINGIRDKQSGKTILDFLKSDGFANRNFMQLIHDDSLTFKEDIQKAQVSGQGDSLHEHIANLAGSPAIKKGILQTVKVVDELVKVMGRHKPENIVIEMARENQTTQKGQKNSRERMKRIEEGIKELGSQILKEHPVENTQLQNEKLYLYYLQNGRDMYVDQELDINRLSDYDVDHIVPQSFLKDDSIDNKVLTRSDKARGKSDNVPSEEVVKKMKNYWRQLLNAKLITQRKFDNLTKAERGGLSELDKAGFIKRQLVETRQITKHVAQILDSRMNTKYDENDKLIREVKVITLKSKLVSDFRKDFQFYKVREINNYHHAHDAYLNAVVGTALIKKYPKLESEFVYGDYKVYDVRKMIAKSEQEIGKATAKYFFYSNIMNFFKTEITLANGEIRKRPLIETNGETGEIVWDKGRDFATVRKVLSMPQVNIVKKTEVQTGGFSKESILPKRNSDKLIARKKDWDPKKYGGFDSPTVAYSVLVVAKVEKGKSKKLKSVKELLGITIMERSSFEKNPIDFLEAKGYKEVKKDLIIKLPKYSLFELENGRKRMLASAGELQKGNELALPSKYVNFLYLASHYEKLKGSPEDNEQKQLFVEQHKHYLDEIIEQISEFSKRVILADANLDKVLSAYNKHRDKPIREQAENIIHLFTLTNLGAPAAFKYFDTTIDRKRYTSTKEVLDATLIHQSITGLYETRIDLSQLGGDGGGGGGSSPAPGGTLQLDDEYRLYSPLVKPDQNIQFWLEQFPQAWAETAGMGLAKQVPPQVIQLKASATPVSVRQYPLSKEAQEGIRPHVQRLIQQGILVPVQSPWNTPLLPVRKPGTNDYRPVQDLREVNKRVQDIHPTVPNPYNLLCALPPQRSWYTVLDLKDAFFCLRLHPTSQPLFAFEWRDPGTGRTGQLTWTRLPQGFKNSPTIFDEALHRDLANFRIQHPQVTLLQYVDDLLLAGATKQDCLEGTKALLLELSDLGYRASAKKAQICRREVTYLGYSLRDGQRWLTEARKKTVVQIPAPTTAKQVREFLGTAGFCRLWIPGFATLAAPLYPLTKEKGEFSWAPEHQKAFDAIKKALLSAPALALPDVTKPFTLYVDERKGVARGVLTQTLGPWRRPVAYLSKKLDPVASGWPVCLKAIAAVAILVKDADKLTLGQNITVIAPHALENIVRQPPDRWMTNARMTHYQSLLLTERVTFAPPAALNPATLLPEETDEPVTHDCHQLLIEETGVRKDLTDIPLTGEVLTWFTDGSSYVVEGKRMAGAAVVDGTRTIWASSLPEGTSAQKAELMALTQALRLAEGKSINIYTDSRYAFATAHVHGAIYKQRGLLTSAGREIKNKEEILSLLEALHLPKRLAIIHCPGHQKAKDPISRGNQMADRVAKQAAQGVNLLAGKRTADGSEFEKRTADGSEFESPKKKAKVE

SEQ ID NO: 7362 - protein, 2085 aa, synthetic construct
MPAAKRVKLDGGDKKYSIGLDIGTNSVGWAVITDEYKVPSKKFKVLGNTDRHSIKKNLIGALLFDSGETAEATRLKRTARRRYTRRKNRICYLQEIFSNEMAKVDDSFFHRLEESFLVEEDKKHERHPIFGNIVDEVAYHEKYPTIYHLRKKLVDSTDKADLRLIYLALAHMIKFRGHFLIEGDLNPDNSDVDKLFIQLVQTYNQLFEENPINASGVDAKAILSARLSKSRRLENLIAQLPGEKKNGLFGNLIALSLGLTPNFKSNFDLAEDAKLQLSKDTYDDDLDNLLAQIGDQYADLFLAAKNLSDAILLSDILRVNTEITKAPLSASMIKRYDEHHQDLTLLKALVRQQLPEKYKEIFFDQSKNGYAGYIDGGASQEEFYKFIKPILEKMDGTEELLVKLNREDLLRKQRTFDNGSIPHQIHLGELHAILRRQEDFYPFLKDNREKIEKILTFRIPYYVGPLARGNSRFAWMTRKSEETITPWNFEEVVDKGASAQSFIERMTNFDKNLPNEKVLPKHSLLYEYFTVYNELTKVKYVTEGMRKPAFLSGEQKKAIVDLLFKTNRKVTVKQLKEDYFKKIECFDSVEISGVEDRFNASLGTYHDLLKIIKDKDFLDNEENEDILEDIVLTLTLFEDREMIEERLKTYAHLFDDKVMKQLKRRRYTGWGRLSRKLINGIRDKQSGKTILDFLKSDGFANRNFMQLIHDDSLTFKEDIQKAQVSGQGDSLHEHIANLAGSPAIKKGILQTVKVVDELVKVMGRHKPENIVIEMARENQTTQKGQKNSRERMKRIEEGIKELGSQILKEHPVENTQLQNEKLYLYYLQNGRDMYVDQELDINRLSDYDVDHIVPQSFLKDDSIDNKVLTRSDKARGKSDNVPSEEVVKKMKNYWRQLLNAKLITQRKFDNLTKAERGGLSELDKAGFIKRQLVETRQITKHVAQILDSRMNTKYDENDKLIREVKVITLKSKLVSDFRKDFQFYKVREINNYHHAHDAYLNAVVGTALIKKYPKLESEFVYGDYKVYDVRKMIAKSEQEIGKATAKYFFYSNIMNFFKTEITLANGEIRKRPLIETNGETGEIVWDKGRDFATVRKVLSMPQVNIVKKTEVQTGGFSKESILPKRNSDKLIARKKDWDPKKYGGFDSPTVAYSVLVVAKVEKGKSKKLKSVKELLGITIMERSSFEKNPIDFLEAKGYKEVKKDLIIKLPKYSLFELENGRKRMLASAGELQKGNELALPSKYVNFLYLASHYEKLKGSPEDNEQKQLFVEQHKHYLDEIIEQISEFSKRVILADANLDKVLSAYNKHRDKPIREQAENIIHLFTLTNLGAPAAFKYFDTTIDRKRYTSTKEVLDATLIHQSITGLYETRIDLSQLGGDGGGGGGSSPAPGGIPWLMKKPLQLTTLVPLQEYEERLLKQTMLTGSYKEKLQSLFLKYDALWQHWENQVGHRRIKPHHIATGTVNPRPQKQYPINPKAKASIQTVINDLLKQGVLIQQNSIMNTPVYPVPKPDGKWRMVLDYREVNKTIPLIAAQNQHSAGILSSIFRGKYKTTLDLSNGFWAHSITPESYWLTAFTWLGQQYCWTRLPQGFLNSPALFNADVVDLLKEVPNVQVYVDDIYISHDDPREHLEQLEKVFSLLLNAGYVVSLKKSEIAQHEVEFLGFNITKEGRGLTETFKQKLLNITPPRDLKQLQSILGKLNFARNFIPNFSELVKPLYNIIATAPGKYITWTTDNSQQLQNIISMLNSAENLEERNPEVRLIMKVNTSPSAGYIRFYNEFAKRPIMYLNYVYTKAEVKFTNTEKLLTTIHKGLIKALDLGMGQEILVYSPIVSMTKIQKTPLPERKALPIRWITWMSYLEDPRIQFHYDKTLPELQQVPTVTDDIIAKIKHPSEFSMVFYTDGSAIKHPNVNKSHNAGMGIAQVQFKPEFTVINTWSIPLGDHTAQLAEVAAVEFACKKALKIDGPVLIVTDSFYVAESVNKELPYWQSNGFFNNKKKPLKHVSKWKSIADCIQLKPDIIIIHEKGHQPTASTFHTEGNNLADKLATQGSYVVNAGKRTADGSEFEKRTADGSEFESPKKKAKVE

SEQ ID NO: 7363 - protein, 2174 aa, synthetic construct
MPAAKRVKLDGGDKKYSIGLDIGTNSVGWAVITDEYKVPSKKFKVLGNTDRHSIKKNLIGALLFDSGETAEATRLKRTARRRYTRRKNRICYLQEIFSNEMAKVDDSFFHRLEESFLVEEDKKHERHPIFGNIVDEVAYHEKYPTIYHLRKKLVDSTDKADLRLIYLALAHMIKFRGHFLIEGDLNPDNSDVDKLFIQLVQTYNQLFEENPINASGVDAKAILSARLSKSRRLENLIAQLPGEKKNGLFGNLIALSLGLTPNFKSNFDLAEDAKLQLSKDTYDDDLDNLLAQIGDQYADLFLAAKNLSDAILLSDILRVNTEITKAPLSASMIKRYDEHHQDLTLLKALVRQQLPEKYKEIFFDQSKNGYAGYIDGGASQEEFYKFIKPILEKMDGTEELLVKLNREDLLRKQRTFDNGSIPHQIHLGELHAILRRQEDFYPFLKDNREKIEKILTFRIPYYVGPLARGNSRFAWMTRKSEETITPWNFEEVVDKGASAQSFIERMTNFDKNLPNEKVLPKHSLLYEYFTVYNELTKVKYVTEGMRKPAFLSGEQKKAIVDLLFKTNRKVTVKQLKEDYFKKIECFDSVEISGVEDRFNASLGTYHDLLKIIKDKDFLDNEENEDILEDIVLTLTLFEDREMIEERLKTYAHLFDDKVMKQLKRRRYTGWGRLSRKLINGIRDKQSGKTILDFLKSDGFANRNFMQLIHDDSLTFKEDIQKAQVSGQGDSLHEHIANLAGSPAIKKGILQTVKVVDELVKVMGRHKPENIVIEMARENQTTQKGQKNSRERMKRIEEGIKELGSQILKEHPVENTQLQNEKLYLYYLQNGRDMYVDQELDINRLSDYDVDHIVPQSFLKDDSIDNKVLTRSDKARGKSDNVPSEEVVKKMKNYWRQLLNAKLITQRKFDNLTKAERGGLSELDKAGFIKRQLVETRQITKHVAQILDSRMNTKYDENDKLIREVKVITLKSKLVSDFRKDFQFYKVREINNYHHAHDAYLNAVVGTALIKKYPKLESEFVYGDYKVYDVRKMIAKSEQEIGKATAKYFFYSNIMNFFKTEITLANGEIRKRPLIETNGETGEIVWDKGRDFATVRKVLSMPQVNIVKKTEVQTGGFSKESILPKRNSDKLIARKKDWDPKKYGGFDSPTVAYSVLVVAKVEKGKSKKLKSVKELLGITIMERSSFEKNPIDFLEAKGYKEVKKDLIIKLPKYSLFELENGRKRMLASAGELQKGNELALPSKYVNFLYLASHYEKLKGSPEDNEQKQLFVEQHKHYLDEIIEQISEFSKRVILADANLDKVLSAYNKHRDKPIREQAENIIHLFTLTNLGAPAAFKYFDTTIDRKRYTSTKEVLDATLIHQSITGLYETRIDLSQLGGDGGGGGGSSPAPGGMNPLQLLQPLPAEVKGTKLLAHWNSGATITCIPESFLEDEQPIKQTLIKTIHGEKQQNVYYLTFKVKGRKVEAEVIASPYEYILLSPTDVPWLTQQPLQLTILVPLQEYQDRILNKTALPEEQKQQLKALFTKYDNLWQHWENQVGHRKIRPHNIATGDYPPRPQKQYPINPKAKPSIQIVIDDLLKQGVLTPQNSTMNTPVYPVPKPDGRWRMVLDYREVNKTIPLTAAQNQHSAGILATIVRQKYKTTLDLANGFWAHPITPDSYWLTAFTWQGKQYCWTRLPQGFLNSPALFTADAVDLLKEVPNVQVYVDDIYLSHDNPHEHIQQLEKVFQILLQAGYVVSLKKSEIGQRTVEFLGFNITKEGRGLTDTFKTKLLNVTPPKDLKQLQSILGLLNFARNFIPNFAELVQTLYNLIASSKGKYIEWTEDNTKQLNKVIEALNTASNLEERLPDQRLVIKVNTSPSAGYVRYYNESGKKPIMYLNYVFSKAELKFSMLEKLLTTMHKALIKAMDLAMGQEILVYSPIVSMTKIQKTPLPERKALPIRWITWMTYLEDPRIQFHYDKTLPELKHIPDVYTSSIPPLKHPSQYEGVFCTDGSAIKSPDPTKSNNAGMGIVHAIYNPEYKILNQWSIPLGHHTAQMAEIAAVEFACKKALKVPGPVLVITDSFYVAESANKELPYWKSNGFVNNKKEPLKHISKWKSIAECLSIKPDITIQHEKGHQPINTSIHTEGNALADKLATQGSYVVNAGKRTADGSEFEKRTADGSEFESPKKKAKVE

SEQ ID NO: 7364 - protein, 2093 aa, synthetic construct
MPAAKRVKLDGGDKKYSIGLDIGTNSVGWAVITDEYKVPSKKFKVLGNTDRHSIKKNLIGALLFDSGETAEATRLKRTARRRYTRRKNRICYLQEIFSNEMAKVDDSFFHRLEESFLVEEDKKHERHPIFGNIVDEVAYHEKYPTIYHLRKKLVDSTDKADLRLIYLALAHMIKFRGHFLIEGDLNPDNSDVDKLFIQLVQTYNQLFEENPINASGVDAKAILSARLSKSRRLENLIAQLPGEKKNGLFGNLIALSLGLTPNFKSNFDLAEDAKLQLSKDTYDDDLDNLLAQIGDQYADLFLAAKNLSDAILLSDILRVNTEITKAPLSASMIKRYDEHHQDLTLLKALVRQQLPEKYKEIFFDQSKNGYAGYIDGGASQEEFYKFIKPILEKMDGTEELLVKLNREDLLRKQRTFDNGSIPHQIHLGELHAILRRQEDFYPFLKDNREKIEKILTFRIPYYVGPLARGNSRFAWMTRKSEETITPWNFEEVVDKGASAQSFIERMTNFDKNLPNEKVLPKHSLLYEYFTVYNELTKVKYVTEGMRKPAFLSGEQKKAIVDLLFKTNRKVTVKQLKEDYFKKIECFDSVEISGVEDRFNASLGTYHDLLKIIKDKDFLDNEENEDILEDIVLTLTLFEDREMIEERLKTYAHLFDDKVMKQLKRRRYTGWGRLSRKLINGIRDKQSGKTILDFLKSDGFANRNFMQLIHDDSLTFKEDIQKAQVSGQGDSLHEHIANLAGSPAIKKGILQTVKVVDELVKVMGRHKPENIVIEMARENQTTQKGQKNSRERMKRIEEGIKELGSQILKEHPVENTQLQNEKLYLYYLQNGRDMYVDQELDINRLSDYDVDHIVPQSFLKDDSIDNKVLTRSDKARGKSDNVPSEEVVKKMKNYWRQLLNAKLITQRKFDNLTKAERGGLSELDKAGFIKRQLVETRQITKHVAQILDSRMNTKYDENDKLIREVKVITLKSKLVSDFRKDFQFYKVREINNYHHAHDAYLNAVVGTALIKKYPKLESEFVYGDYKVYDVRKMIAKSEQEIGKATAKYFFYSNIMNFFKTEITLANGEIRKRPLIETNGETGEIVWDKGRDFATVRKVLSMPQVNIVKKTEVQTGGFSKESILPKRNSDKLIARKKDWDPKKYGGFDSPTVAYSVLVVAKVEKGKSKKLKSVKELLGITIMERSSFEKNPIDFLEAKGYKEVKKDLIIKLPKYSLFELENGRKRMLASAGELQKGNELALPSKYVNFLYLASHYEKLKGSPEDNEQKQLFVEQHKHYLDEIIEQISEFSKRVILADANLDKVLSAYNKHRDKPIREQAENIIHLFTLTNLGAPAAFKYFDTTIDRKRYTSTKEVLDATLIHQSITGLYETRIDLSQLGGDGGGGGPAPGSSGGTLQLEEEYRLFEPESTQKQEMDIWLKNFPQAWAETGGMGTAHCQAPVLIQLKATATPISIRQYPMPHEAYQGIKPHIRRMLDQGILKPCQSPWNTPLLPVKKPGTEDYRPVQDLREVNKRVEDIHPTVPNPYNLLSTLPPSHPWYTVLDLKDAFFCLRLHSESQLLFAFEWRDPEIGLSGQLTWTRLPQGFKNSPTLFNEALHSDLADFRVRYPALVLLQYVDDLLLAAATRTECLEGTKALLETLGNKGYRASAKKAQICLQEVTYLGYSLKDGQRWLTKARKEAILSIPVPKNSRQVREFLGTAGYCRLWIPGFAELAAPLYPLTRPGTLFQWGTEQQLAFEDIKKALLSSPALGLPDITKPFELFIDENSGFAKGVLVQKLGPWKRPVAYLSKKLDTVASGWPPCLRMVAAIAILVKDAGKLTLGQPLTILTSHPVEALVRQPPNKWLSNARMTHYQAMLLDAERVHFGPTVSLNPATLLPLPSGGNHHDCLQILAETHGTRPDLTDQPLPDADLTWYTDGSSFIRNGEREAGAAVTTESEVIWAAPLPPGTSAQRAELIALTQALKMAEGKKLTVYTDSRYAFATTHVHGEIYRRRGWLTSEGKEIKNKNEILALLEALFLPKRLSIIHCPGHQKGDSPQAKGNRLADDTAKKAATETHSSLTVLPAGKRTADGSEFEKRTADGSEFESPKKKAKVE

SEQ ID NO: 7365 - protein, 2093 aa, synthetic construct
MPAAKRVKLDGGDKKYSIGLDIGTNSVGWAVITDEYKVPSKKFKVLGNTDRHSIKKNLIGALLFDSGETAEATRLKRTARRRYTRRKNRICYLQEIFSNEMAKVDDSFFHRLEESFLVEEDKKHERHPIFGNIVDEVAYHEKYPTIYHLRKKLVDSTDKADLRLIYLALAHMIKFRGHFLIEGDLNPDNSDVDKLFIQLVQTYNQLFEENPINASGVDAKAILSARLSKSRRLENLIAQLPGEKKNGLFGNLIALSLGLTPNFKSNFDLAEDAKLQLSKDTYDDDLDNLLAQIGDQYADLFLAAKNLSDAILLSDILRVNTEITKAPLSASMIKRYDEHHQDLTLLKALVRQQLPEKYKEIFFDQSKNGYAGYIDGGASQEEFYKFIKPILEKMDGTEELLVKLNREDLLRKQRTFDNGSIPHQIHLGELHAILRRQEDFYPFLKDNREKIEKILTFRIPYYVGPLARGNSRFAWMTRKSEETITPWNFEEVVDKGASAQSFIERMTNFDKNLPNEKVLPKHSLLYEYFTVYNELTKVKYVTEGMRKPAFLSGEQKKAIVDLLFKTNRKVTVKQLKEDYFKKIECFDSVEISGVEDRFNASLGTYHDLLKIIKDKDFLDNEENEDILEDIVLTLTLFEDREMIEERLKTYAHLFDDKVMKQLKRRRYTGWGRLSRKLINGIRDKQSGKTILDFLKSDGFANRNFMQLIHDDSLTFKEDIQKAQVSGQGDSLHEHIANLAGSPAIKKGILQTVKVVDELVKVMGRHKPENIVIEMARENQTTQKGQKNSRERMKRIEEGIKELGSQILKEHPVENTQLQNEKLYLYYLQNGRDMYVDQELDINRLSDYDVDHIVPQSFLKDDSIDNKVLTRSDKARGKSDNVPSEEVVKKMKNYWRQLLNAKLITQRKFDNLTKAERGGLSELDKAGFIKRQLVETRQITKHVAQILDSRMNTKYDENDKLIREVKVITLKSKLVSDFRKDFQFYKVREINNYHHAHDAYLNAVVGTALIKKYPKLESEFVYGDYKVYDVRKMIAKSEQEIGKATAKYFFYSNIMNFFKTEITLANGEIRKRPLIETNGETGEIVWDKGRDFATVRKVLSMPQVNIVKKTEVQTGGFSKESILPKRNSDKLIARKKDWDPKKYGGFDSPTVAYSVLVVAKVEKGKSKKLKSVKELLGITIMERSSFEKNPIDFLEAKGYKEVKKDLIIKLPKYSLFELENGRKRMLASAGELQKGNELALPSKYVNFLYLASHYEKLKGSPEDNEQKQLFVEQHKHYLDEIIEQISEFSKRVILADANLDKVLSAYNKHRDKPIREQAENIIHLFTLTNLGAPAAFKYFDTTIDRKRYTSTKEVLDATLIHQSITGLYETRIDLSQLGGDGGGGGPAPGSSGGTLQLEEEYRLFEPESTQKQEMDIWLKNFPQAWAETGGMGTAHCQAPVLIQLKATATPISIRQYPMPHEAYQGIKPHIRRMLDQGILKPCQSPWNTPLLPVKKPGTEDYRPVQDLREVNKRVEDIHPTVPNPYNLLSTLPPSHPWYTVLDLKDAFFCLRLHSESQLLFAFEWRDPEIGLSGQLTWTRLPQGFKNSPTLFNEALHSDLADFRVRYPALVLLQYVDDLLLAAATRTECLEGTKALLETLGNKGYRASAKKAQICLQEVTYLGYSLKDGQRWLTKARKEAILSIPVPKNSRQVREFLGKAGYCRLFIPGFAELAAPLYPLTRPGTLFQWGTEQQLAFEDIKKALLSSPALGLPDITKPFELFIDENSGFAKGVLVQKLGPWKRPVAYLSKKLDTVASGWPPCLRMVAAIAILVKDAGKLTLGQPLTILTSHPVEALVRQPPNKWLSNARMTHYQAMLLDAERVHFGPTVSLNPATLLPLPSGGNHHDCLQILAETHGTRPDLTDQPLPDADLTWYTDGSSFIRNGEREAGAAVTTESEVIWAAPLPPGTSAQRAELIALTQALKMAEGKKLTVYTDSRYAFATTHVHGEIYRRRGWLTSEGKEIKNKNEILALLEALFLPKRLSIIHCPGHQKGDSPQAKGNRLADDTAKKAATETHSSLTVLPAGKRTADGSEFEKRTADGSEFESPKKKAKVE

SEQ ID NO: 7366 - protein, 2174 aa, synthetic construct
MPAAKRVKLDGGDKKYSIGLDIGTNSVGWAVITDEYKVPSKKFKVLGNTDRHSIKKNLIGALLFDSGETAEATRLKRTARRRYTRRKNRICYLQEIFSNEMAKVDDSFFHRLEESFLVEEDKKHERHPIFGNIVDEVAYHEKYPTIYHLRKKLVDSTDKADLRLIYLALAHMIKFRGHFLIEGDLNPDNSDVDKLFIQLVQTYNQLFEENPINASGVDAKAILSARLSKSRRLENLIAQLPGEKKNGLFGNLIALSLGLTPNFKSNFDLAEDAKLQLSKDTYDDDLDNLLAQIGDQYADLFLAAKNLSDAILLSDILRVNTEITKAPLSASMIKRYDEHHQDLTLLKALVRQQLPEKYKEIFFDQSKNGYAGYIDGGASQEEFYKFIKPILEKMDGTEELLVKLNREDLLRKQRTFDNGSIPHQIHLGELHAILRRQEDFYPFLKDNREKIEKILTFRIPYYVGPLARGNSRFAWMTRKSEETITPWNFEEVVDKGASAQSFIERMTNFDKNLPNEKVLPKHSLLYEYFTVYNELTKVKYVTEGMRKPAFLSGEQKKAIVDLLFKTNRKVTVKQLKEDYFKKIECFDSVEISGVEDRFNASLGTYHDLLKIIKDKDFLDNEENEDILEDIVLTLTLFEDREMIEERLKTYAHLFDDKVMKQLKRRRYTGWGRLSRKLINGIRDKQSGKTILDFLKSDGFANRNFMQLIHDDSLTFKEDIQKAQVSGQGDSLHEHIANLAGSPAIKKGILQTVKVVDELVKVMGRHKPENIVIEMARENQTTQKGQKNSRERMKRIEEGIKELGSQILKEHPVENTQLQNEKLYLYYLQNGRDMYVDQELDINRLSDYDVDHIVPQSFLKDDSIDNKVLTRSDKARGKSDNVPSEEVVKKMKNYWRQLLNAKLITQRKFDNLTKAERGGLSELDKAGFIKRQLVETRQITKHVAQILDSRMNTKYDENDKLIREVKVITLKSKLVSDFRKDFQFYKVREINNYHHAHDAYLNAVVGTALIKKYPKLESEFVYGDYKVYDVRKMIAKSEQEIGKATAKYFFYSNIMNFFKTEITLANGEIRKRPLIETNGETGEIVWDKGRDFATVRKVLSMPQVNIVKKTEVQTGGFSKESILPKRNSDKLIARKKDWDPKKYGGFDSPTVAYSVLVVAKVEKGKSKKLKSVKELLGITIMERSSFEKNPIDFLEAKGYKEVKKDLIIKLPKYSLFELENGRKRMLASAGELQKGNELALPSKYVNFLYLASHYEKLKGSPEDNEQKQLFVEQHKHYLDEIIEQISEFSKRVILADANLDKVLSAYNKHRDKPIREQAENIIHLFTLTNLGAPAAFKYFDTTIDRKRYTSTKEVLDATLIHQSITGLYETRIDLSQLGGDGGGGGPAPGSSGGMNPLQLLQPLPAEIKGTKLLAHWNSGATITCIPESFLEDEQPIKKTLIKTIHGEKQQNVYYVTFKVKGRKVEAEVIASPYEYILLSPTDVPWLTQQPLQLTILVPLQEYQEKILSKTALPEDQKQQLKTLFVKYDNLWQHWENQVGHRKIRPHNIATGDYPPRPQKQYPINPKAKPSIQIVIDDLLKQGVLTPQNSTMNTPVYPVPKPDGRWRMVLDYREVNKTIPLTAAQNQHSAGILATIVRQKYKTTLDLANGFWAHPITPESYWLTAFTWQGKQYCWTRLPQGFLNSPALFNADVVDLLKEIPNVQVYVDDIYLSHDDPKEHVQQLEKVFQILLQAGYVVSLKKSEIGQKTVEFLGFNITKEGRGLTDTFKTKLLNITPPKDLKQLQSILGLLNFARNFIPNFAELVQPLYNLIAPAKGKYIEWSEENTKQLNMVIEALNTASNLEERLPEQRLVIKVNTSPSAGYVRYYNETGKKPIMYLNYVFSKAELKFSMLEKLLTTMHKALIKAMDLAMGQEILVYSPIVSMTKIQKTPLPERKALPIRWITWMTYLEDPRIQFHYDKTLPELKHIPDVYTSSQSPVKHPSQYEGVFYTDGSAIKSPDPTKSNNAGMGIVHATYKPEYQVLNQWSIPLGNHTAQMAEIAAVEFACKKALKIPGPVLVITDSFYVAESANKELPYWKSNGFVNNKKKPLKHISKWKSIAECLSMKPDITIQHEKGISLQIPVFILKGNALADKLATQGSYVVNAGKRTADGSEFEKRTADGSEFESPKKKAKVE

SEQ ID NO: 7367 - protein, 2007 aa, synthetic construct
MPAAKRVKLDGGDKKYSIGLDIGTNSVGWAVITDEYKVPSKKFKVLGNTDRHSIKKNLIGALLFDSGETAEATRLKRTARRRYTRRKNRICYLQEIFSNEMAKVDDSFFHRLEESFLVEEDKKHERHPIFGNIVDEVAYHEKYPTIYHLRKKLVDSTDKADLRLIYLALAHMIKFRGHFLIEGDLNPDNSDVDKLFIQLVQTYNQLFEENPINASGVDAKAILSARLSKSRRLENLIAQLPGEKKNGLFGNLIALSLGLTPNFKSNFDLAEDAKLQLSKDTYDDDLDNLLAQIGDQYADLFLAAKNLSDAILLSDILRVNTEITKAPLSASMIKRYDEHHQDLTLLKALVRQQLPEKYKEIFFDQSKNGYAGYIDGGASQEEFYKFIKPILEKMDGTEELLVKLNREDLLRKQRTFDNGSIPHQIHLGELHAILRRQEDFYPFLKDNREKIEKILTFRIPYYVGPLARGNSRFAWMTRKSEETITPWNFEEVVDKGASAQSFIERMTNFDKNLPNEKVLPKHSLLYEYFTVYNELTKVKYVTEGMRKPAFLSGEQKKAIVDLLFKTNRKVTVKQLKEDYFKKIECFDSVEISGVEDRFNASLGTYHDLLKIIKDKDFLDNEENEDILEDIVLTLTLFEDREMIEERLKTYAHLFDDKVMKQLKRRRYTGWGRLSRKLINGIRDKQSGKTILDFLKSDGFANRNFMQLIHDDSLTFKEDIQKAQVSGQGDSLHEHIANLAGSPAIKKGILQTVKVVDELVKVMGRHKPENIVIEMARENQTTQKGQKNSRERMKRIEEGIKELGSQILKEHPVENTQLQNEKLYLYYLQNGRDMYVDQELDINRLSDYDVDHIVPQSFLKDDSIDNKVLTRSDKARGKSDNVPSEEVVKKMKNYWRQLLNAKLITQRKFDNLTKAERGGLSELDKAGFIKRQLVETRQITKHVAQILDSRMNTKYDENDKLIREVKVITLKSKLVSDFRKDFQFYKVREINNYHHAHDAYLNAVVGTALIKKYPKLESEFVYGDYKVYDVRKMIAKSEQEIGKATAKYFFYSNIMNFFKTEITLANGEIRKRPLIETNGETGEIVWDKGRDFATVRKVLSMPQVNIVKKTEVQTGGFSKESILPKRNSDKLIARKKDWDPKKYGGFDSPTVAYSVLVVAKVEKGKSKKLKSVKELLGITIMERSSFEKNPIDFLEAKGYKEVKKDLIIKLPKYSLFELENGRKRMLASAGELQKGNELALPSKYVNFLYLASHYEKLKGSPEDNEQKQLFVEQHKHYLDEIIEQISEFSKRVILADANLDKVLSAYNKHRDKPIREQAENIIHLFTLTNLGAPAAFKYFDTTIDRKRYTSTKEVLDATLIHQSITGLYETRIDLSQLGGDGGGGGPAPGSSGGGLEHLPPPPEVSQFPLNPERLQALTDLVSRALEAKHIEPYQGPGNNPIFPVKKPNGKWRFIHDLRATNSLTRDLASPSPGPPDLTSLPQDLPHLRTIDLTDAFFQIPLPAVFQPYFAFTLPQPNNHGPGTRYSWRVLPQGFKNSPTLFQQQLSHILAPVRKAFPNSLIIQYMDDILLASPALRELTALTDKVTNALTKEGLPMSLEKTQATPGSIHFLGQVISPDCITYETLPSIHVKSIWSLAELQSMLGELQWVSKGTPVLRSSLHQLYLALRGHRDPRDTIELTSTQVQALKTIQKALALNCRSRLVSQLPILALIILRPTGTTAVLFQTKQKWPLVWLHTPHPATSLRPWGQLLANAIITLDKYSLQHYGQICKSFHHNISNQALTYYLHTSDQSSVAILLQHSHRFHNLGAQPSGPWRSLLQVPQIFQNIDVLRPPFIISPVVIDHAPCLFSDGATSKAAFILWDKQVIHQQVLPLPSTCSAQAGELFGLLAGLQKSKPWPALNIFLDSKFLIGHLRRMAWGAFLGPSTQCDLHARLFPLLQGKTVYVHHVRSHTLLQDPISRLNEATDALMLAPLLPLAGKRTADGSEFEKRTADGSEFESPKKKAKVE

SEQ ID NO: 7368 - protein, 2125 aa, synthetic construct
MPAAKRVKLDGGDKKYSIGLDIGTNSVGWAVITDEYKVPSKKFKVLGNTDRHSIKKNLIGALLFDSGETAEATRLKRTARRRYTRRKNRICYLQEIFSNEMAKVDDSFFHRLEESFLVEEDKKHERHPIFGNIVDEVAYHEKYPTIYHLRKKLVDSTDKADLRLIYLALAHMIKFRGHFLIEGDLNPDNSDVDKLFIQLVQTYNQLFEENPINASGVDAKAILSARLSKSRRLENLIAQLPGEKKNGLFGNLIALSLGLTPNFKSNFDLAEDAKLQLSKDTYDDDLDNLLAQIGDQYADLFLAAKNLSDAILLSDILRVNTEITKAPLSASMIKRYDEHHQDLTLLKALVRQQLPEKYKEIFFDQSKNGYAGYIDGGASQEEFYKFIKPILEKMDGTEELLVKLNREDLLRKQRTFDNGSIPHQIHLGELHAILRRQEDFYPFLKDNREKIEKILTFRIPYYVGPLARGNSRFAWMTRKSEETITPWNFEEVVDKGASAQSFIERMTNFDKNLPNEKVLPKHSLLYEYFTVYNELTKVKYVTEGMRKPAFLSGEQKKAIVDLLFKTNRKVTVKQLKEDYFKKIECFDSVEISGVEDRFNASLGTYHDLLKIIKDKDFLDNEENEDILEDIVLTLTLFEDREMIEERLKTYAHLFDDKVMKQLKRRRYTGWGRLSRKLINGIRDKQSGKTILDFLKSDGFANRNFMQLIHDDSLTFKEDIQKAQVSGQGDSLHEHIANLAGSPAIKKGILQTVKVVDELVKVMGRHKPENIVIEMARENQTTQKGQKNSRERMKRIEEGIKELGSQILKEHPVENTQLQNEKLYLYYLQNGRDMYVDQELDINRLSDYDVDHIVPQSFLKDDSIDNKVLTRSDKARGKSDNVPSEEVVKKMKNYWRQLLNAKLITQRKFDNLTKAERGGLSELDKAGFIKRQLVETRQITKHVAQILDSRMNTKYDENDKLIREVKVITLKSKLVSDFRKDFQFYKVREINNYHHAHDAYLNAVVGTALIKKYPKLESEFVYGDYKVYDVRKMIAKSEQEIGKATAKYFFYSNIMNFFKTEITLANGEIRKRPLIETNGETGEIVWDKGRDFATVRKVLSMPQVNIVKKTEVQTGGFSKESILPKRNSDKLIARKKDWDPKKYGGFDSPTVAYSVLVVAKVEKGKSKKLKSVKELLGITIMERSSFEKNPIDFLEAKGYKEVKKDLIIKLPKYSLFELENGRKRMLASAGELQKGNELALPSKYVNFLYLASHYEKLKGSPEDNEQKQLFVEQHKHYLDEIIEQISEFSKRVILADANLDKVLSAYNKHRDKPIREQAENIIHLFTLTNLGAPAAFKYFDTTIDRKRYTSTKEVLDATLIHQSITGLYETRIDLSQLGGDGGGGGPAPGSSGGLLGRDLLTKLKAQIQFSTEGPQVTWEDRPAMCLVLNLEEEYRLHEKPVPPSIDPSWLQLFPMVWAEKAGMGLANQVPPVVVELKSDASPVAVRQYPMSKEAREGIRPHIQRFLDLGILVPCQSPWNTPLLPVKKPGTNDYRPVQDLREVNKRVQDIHPTVPNPYNLLSSLPPSHTWYSVLDLKDAFFCLKLHPNSQPLFAFEWRDPEKGNTGQLTWTRLPQGFKNSPTLFNEALHRDLASFRALNPQVVMLQYVDDLLVAAPTYRDCKEGTRRLLQELSKLGYRVSAKKAQLCREEVTYLGYLLKGGKRWLTPARKATVMKIPTPTTPRQVREFLGTAGFCRLWIPGFASLAAPLYPLTRPKVPFTWTEAHQEAFGRIKEALLSAPALALPDLTKPFALYVDEKEGVARGVLTQTLGPWRRPVAYLSKKLDPVASGWPTCLKAIAAVALLLKDADKLTLGQNVLVIAPHNLESIVRQPPDRWMTNARMTHYQSLLLNERVSFAPPAILNPATLLPVESDDTPIHICSEILAEETGTRPDLRDQPLPGVPAWYTDGSSFIMDGRRQAGAAIVDNKRTVWASNLPEGTSAQKAELIALTQALRLAEGKSINIYTDSRYAFATAHVHGAIYKQRGWLTSAGKDIKNKEEILALLEAIHLPKRVAIIHCPGHQRGTDPVATGNRKADEAAKQAAQSTRILTETTKNAGKRTADGSEFEKRTADGSEFESPKKKAKVE

SEQ ID NO: 7369 - protein, 2125 aa, synthetic construct
MPAAKRVKLDGGDKKYSIGLDIGTNSVGWAVITDEYKVPSKKFKVLGNTDRHSIKKNLIGALLFDSGETAEATRLKRTARRRYTRRKNRICYLQEIFSNEMAKVDDSFFHRLEESFLVEEDKKHERHPIFGNIVDEVAYHEKYPTIYHLRKKLVDSTDKADLRLIYLALAHMIKFRGHFLIEGDLNPDNSDVDKLFIQLVQTYNQLFEENPINASGVDAKAILSARLSKSRRLENLIAQLPGEKKNGLFGNLIALSLGLTPNFKSNFDLAEDAKLQLSKDTYDDDLDNLLAQIGDQYADLFLAAKNLSDAILLSDILRVNTEITKAPLSASMIKRYDEHHQDLTLLKALVRQQLPEKYKEIFFDQSKNGYAGYIDGGASQEEFYKFIKPILEKMDGTEELLVKLNREDLLRKQRTFDNGSIPHQIHLGELHAILRRQEDFYPFLKDNREKIEKILTFRIPYYVGPLARGNSRFAWMTRKSEETITPWNFEEVVDKGASAQSFIERMTNFDKNLPNEKVLPKHSLLYEYFTVYNELTKVKYVTEGMRKPAFLSGEQKKAIVDLLFKTNRKVTVKQLKEDYFKKIECFDSVEISGVEDRFNASLGTYHDLLKIIKDKDFLDNEENEDILEDIVLTLTLFEDREMIEERLKTYAHLFDDKVMKQLKRRRYTGWGRLSRKLINGIRDKQSGKTILDFLKSDGFANRNFMQLIHDDSLTFKEDIQKAQVSGQGDSLHEHIANLAGSPAIKKGILQTVKVVDELVKVMGRHKPENIVIEMARENQTTQKGQKNSRERMKRIEEGIKELGSQILKEHPVENTQLQNEKLYLYYLQNGRDMYVDQELDINRLSDYDVDHIVPQSFLKDDSIDNKVLTRSDKARGKSDNVPSEEVVKKMKNYWRQLLNAKLITQRKFDNLTKAERGGLSELDKAGFIKRQLVETRQITKHVAQILDSRMNTKYDENDKLIREVKVITLKSKLVSDFRKDFQFYKVREINNYHHAHDAYLNAVVGTALIKKYPKLESEFVYGDYKVYDVRKMIAKSEQEIGKATAKYFFYSNIMNFFKTEITLANGEIRKRPLIETNGETGEIVWDKGRDFATVRKVLSMPQVNIVKKTEVQTGGFSKESILPKRNSDKLIARKKDWDPKKYGGFDSPTVAYSVLVVAKVEKGKSKKLKSVKELLGITIMERSSFEKNPIDFLEAKGYKEVKKDLIIKLPKYSLFELENGRKRMLASAGELQKGNELALPSKYVNFLYLASHYEKLKGSPEDNEQKQLFVEQHKHYLDEIIEQISEFSKRVILADANLDKVLSAYNKHRDKPIREQAENIIHLFTLTNLGAPAAFKYFDTTIDRKRYTSTKEVLDATLIHQSITGLYETRIDLSQLGGDGGGGGPAPGSSGGLLGRDLLTKLKAQIQFSTEGPQVTWEDRPAMCLVLNLEEEYRLHEKPVPPSIDPSWLQLFPMVWAEKAGMGLANQVPPVVVELKSDASPVAVRQYPMSKEAREGIRPHIQRFLDLGILVPCQSPWNTPLLPVKKPGTNDYRPVQDLREVNKRVQDIHPTVPNPYNLLSSLPPSHTWYSVLDLKDAFFCLKLHPNSQPLFAFEWRDPEKGNTGQLTWTRLPQGFKNSPTLFNEALHRDLASFRALNPQVVMLQYVDDLLVAAPTYRDCKEGTRRLLQELSKLGYRVSAKKAQLCREEVTYLGYLLKGGKRWLTPARKATVMKIPTPTTPRQVREFLGKAGFCRLFIPGFASLAAPLYPLTRPKVPFTWTEAHQEAFGRIKEALLSAPALALPDLTKPFALYVDEKEGVARGVLTQTLGPWRRPVAYLSKKLDPVASGWPTCLKAIAAVALLLKDADKLTLGQNVLVIAPHNLESIVRQPPDRWMTNARMTHYQSLLLNERVSFAPPAILNPATLLPVESDDTPIHICSEILAEETGTRPDLRDQPLPGVPAWYTDGSSFIMDGRRQAGAAIVDNKRTVWASNLPEGTSAQKAELIALTQALRLAEGKSINIYTDSRYAFATAHVHGAIYKQRGWLTSAGKDIKNKEEILALLEAIHLPKRVAIIHCPGHQRGTDPVATGNRKADEAAKQAAQSTRILTETTKNAGKRTADGSEFEKRTADGSEFESPKKKAKVE

SEQ ID NO: 7370 - protein, 2216 aa, synthetic construct
MPAAKRVKLDGGDKKYSIGLDIGTNSVGWAVITDEYKVPSKKFKVLGNTDRHSIKKNLIGALLFDSGETAEATRLKRTARRRYTRRKNRICYLQEIFSNEMAKVDDSFFHRLEESFLVEEDKKHERHPIFGNIVDEVAYHEKYPTIYHLRKKLVDSTDKADLRLIYLALAHMIKFRGHFLIEGDLNPDNSDVDKLFIQLVQTYNQLFEENPINASGVDAKAILSARLSKSRRLENLIAQLPGEKKNGLFGNLIALSLGLTPNFKSNFDLAEDAKLQLSKDTYDDDLDNLLAQIGDQYADLFLAAKNLSDAILLSDILRVNTEITKAPLSASMIKRYDEHHQDLTLLKALVRQQLPEKYKEIFFDQSKNGYAGYIDGGASQEEFYKFIKPILEKMDGTEELLVKLNREDLLRKQRTFDNGSIPHQIHLGELHAILRRQEDFYPFLKDNREKIEKILTFRIPYYVGPLARGNSRFAWMTRKSEETITPWNFEEVVDKGASAQSFIERMTNFDKNLPNEKVLPKHSLLYEYFTVYNELTKVKYVTEGMRKPAFLSGEQKKAIVDLLFKTNRKVTVKQLKEDYFKKIECFDSVEISGVEDRFNASLGTYHDLLKIIKDKDFLDNEENEDILEDIVLTLTLFEDREMIEERLKTYAHLFDDKVMKQLKRRRYTGWGRLSRKLINGIRDKQSGKTILDFLKSDGFANRNFMQLIHDDSLTFKEDIQKAQVSGQGDSLHEHIANLAGSPAIKKGILQTVKVVDELVKVMGRHKPENIVIEMARENQTTQKGQKNSRERMKRIEEGIKELGSQILKEHPVENTQLQNEKLYLYYLQNGRDMYVDQELDINRLSDYDVDHIVPQSFLKDDSIDNKVLTRSDKARGKSDNVPSEEVVKKMKNYWRQLLNAKLITQRKFDNLTKAERGGLSELDKAGFIKRQLVETRQITKHVAQILDSRMNTKYDENDKLIREVKVITLKSKLVSDFRKDFQFYKVREINNYHHAHDAYLNAVVGTALIKKYPKLESEFVYGDYKVYDVRKMIAKSEQEIGKATAKYFFYSNIMNFFKTEITLANGEIRKRPLIETNGETGEIVWDKGRDFATVRKVLSMPQVNIVKKTEVQTGGFSKESILPKRNSDKLIARKKDWDPKKYGGFDSPTVAYSVLVVAKVEKGKSKKLKSVKELLGITIMERSSFEKNPIDFLEAKGYKEVKKDLIIKLPKYSLFELENGRKRMLASAGELQKGNELALPSKYVNFLYLASHYEKLKGSPEDNEQKQLFVEQHKHYLDEIIEQISEFSKRVILADANLDKVLSAYNKHRDKPIREQAENIIHLFTLTNLGAPAAFKYFDTTIDRKRYTSTKEVLDATLIHQSITGLYETRIDLSQLGGDGGGGGPAPGSSGGTLGDQGSRGSDPLPEPRVTLTVEGIPTEFLVNTGAEHSVLTKPMGKMGSKRTVVAGATGSKVYPWTTKRLLKIGQKQVTHSFLVIPECPAPLLGRDLLTKLKAQIQFSTEGPQVTWEDRPAMCLVLNLEEEYRLHEKPVPPSIDPSWLQLFPMVWAEKAGMGLANQVPPVVVELKSDASPVAVRQYPMSKEAREGIRPHIQRFLDLGILVPCQSPWNTPLLPVKKPGTNDYRPVQDLREVNKRVQDIHPTVPNPYNLLSSLPPSHTWYSVLDLKDAFFCLKLHPNSQPLFAFEWRDPEKGNTGQLTWTRLPQGFKNSPTLFNEALHRDLASFRALNPQVVMLQYVDDLLVAAPTYRDCKEGTRRLLQELSKLGYRVSAKKAQLCREEVTYLGYLLKGGKRWLTPARKATVMKIPTPTTPRQVREFLGTAGFCRLWIPGFASLAAPLYPLTRPKVPFTWTEAHQEAFGRIKEALLSAPALALPDLTKPFALYVDEKEGVARGVLTQTLGPWRRPVAYLSKKLDPVASGWPTCLKAIAAVALLLKDADKLTLGQNVLVIAPHNLESIVRQPPDRWMTNARMTHYQSLLLNERVSFAPPAILNPATLLPVESDDTPIHICSEILAEETGTRPDLRDQPLPGVPAWYTDGSSFIMDGRRQAGAAIVDNKRTVWASNLPEGTSAQKAELIALTQALRLAEGKSINIYTDSRYAFATAHVHGAIYKQRGWLTSAGKDIKNKEEILALLEAIHLPKRVAIIHCPGHQRGTDPVATGNRKADEAAKQAAQSTRILTETTKNAGKRTADGSEFEKRTADGSEFESPKKKAKVE

SEQ ID NO: 7371 - protein, 2216 aa, synthetic construct
MPAAKRVKLDGGDKKYSIGLDIGTNSVGWAVITDEYKVPSKKFKVLGNTDRHSIKKNLIGALLFDSGETAEATRLKRTARRRYTRRKNRICYLQEIFSNEMAKVDDSFFHRLEESFLVEEDKKHERHPIFGNIVDEVAYHEKYPTIYHLRKKLVDSTDKADLRLIYLALAHMIKFRGHFLIEGDLNPDNSDVDKLFIQLVQTYNQLFEENPINASGVDAKAILSARLSKSRRLENLIAQLPGEKKNGLFGNLIALSLGLTPNFKSNFDLAEDAKLQLSKDTYDDDLDNLLAQIGDQYADLFLAAKNLSDAILLSDILRVNTEITKAPLSASMIKRYDEHHQDLTLLKALVRQQLPEKYKEIFFDQSKNGYAGYIDGGASQEEFYKFIKPILEKMDGTEELLVKLNREDLLRKQRTFDNGSIPHQIHLGELHAILRRQEDFYPFLKDNREKIEKILTFRIPYYVGPLARGNSRFAWMTRKSEETITPWNFEEVVDKGASAQSFIERMTNFDKNLPNEKVLPKHSLLYEYFTVYNELTKVKYVTEGMRKPAFLSGEQKKAIVDLLFKTNRKVTVKQLKEDYFKKIECFDSVEISGVEDRFNASLGTYHDLLKIIKDKDFLDNEENEDILEDIVLTLTLFEDREMIEERLKTYAHLFDDKVMKQLKRRRYTGWGRLSRKLINGIRDKQSGKTILDFLKSDGFANRNFMQLIHDDSLTFKEDIQKAQVSGQGDSLHEHIANLAGSPAIKKGILQTVKVVDELVKVMGRHKPENIVIEMARENQTTQKGQKNSRERMKRIEEGIKELGSQILKEHPVENTQLQNEKLYLYYLQNGRDMYVDQELDINRLSDYDVDHIVPQSFLKDDSIDNKVLTRSDKARGKSDNVPSEEVVKKMKNYWRQLLNAKLITQRKFDNLTKAERGGLSELDKAGFIKRQLVETRQITKHVAQILDSRMNTKYDENDKLIREVKVITLKSKLVSDFRKDFQFYKVREINNYHHAHDAYLNAVVGTALIKKYPKLESEFVYGDYKVYDVRKMIAKSEQEIGKATAKYFFYSNIMNFFKTEITLANGEIRKRPLIETNGETGEIVWDKGRDFATVRKVLSMPQVNIVKKTEVQTGGFSKESILPKRNSDKLIARKKDWDPKKYGGFDSPTVAYSVLVVAKVEKGKSKKLKSVKELLGITIMERSSFEKNPIDFLEAKGYKEVKKDLIIKLPKYSLFELENGRKRMLASAGELQKGNELALPSKYVNFLYLASHYEKLKGSPEDNEQKQLFVEQHKHYLDEIIEQISEFSKRVILADANLDKVLSAYNKHRDKPIREQAENIIHLFTLTNLGAPAAFKYFDTTIDRKRYTSTKEVLDATLIHQSITGLYETRIDLSQLGGDGGGGGPAPGSSGGTLGDQGSRGSDPLPEPRVTLTVEGIPTEFLVNTGAEHSVLTKPMGKMGSKRTVVAGATGSKVYPWTTKRLLKIGQKQVTHSFLVIPECPAPLLGRDLLTKLKAQIQFSTEGPQVTWEDRPAMCLVLNLEEEYRLHEKPVPPSIDPSWLQLFPMVWAEKAGMGLANQVPPVVVELKSDASPVAVRQYPMSKEAREGIRPHIQRFLDLGILVPCQSPWNTPLLPVKKPGTNDYRPVQDLREVNKRVQDIHPTVPNPYNLLSSLPPSHTWYSVLDLKDAFFCLKLHPNSQPLFAFEWRDPEKGNTGQLTWTRLPQGFKNSPTLFNEALHRDLASFRALNPQVVMLQYVDDLLVAAPTYRDCKEGTRRLLQELSKLGYRVSAKKAQLCREEVTYLGYLLKGGKRWLTPARKATVMKIPTPTTPRQVREFLGKAGFCRLFIPGFASLAAPLYPLTRPKVPFTWTEAHQEAFGRIKEALLSAPALALPDLTKPFALYVDEKEGVARGVLTQTLGPWRRPVAYLSKKLDPVASGWPTCLKAIAAVALLLKDADKLTLGQNVLVIAPHNLESIVRQPPDRWMTNARMTHYQSLLLNERVSFAPPAILNPATLLPVESDDTPIHICSEILAEETGTRPDLRDQPLPGVPAWYTDGSSFIMDGRRQAGAAIVDNKRTVWASNLPEGTSAQKAELIALTQALRLAEGKSINIYTDSRYAFATAHVHGAIYKQRGWLTSAGKDIKNKEEILALLEAIHLPKRVAIIHCPGHQRGTDPVATGNRKADEAAKQAAQSTRILTETTKNAGKRTADGSEFEKRTADGSEFESPKKKAKVE

SEQ ID NO: 7372 - protein, 2094 aa, synthetic construct
MPAAKRVKLDGGDKKYSIGLDIGTNSVGWAVITDEYKVPSKKFKVLGNTDRHSIKKNLIGALLFDSGETAEATRLKRTARRRYTRRKNRICYLQEIFSNEMAKVDDSFFHRLEESFLVEEDKKHERHPIFGNIVDEVAYHEKYPTIYHLRKKLVDSTDKADLRLIYLALAHMIKFRGHFLIEGDLNPDNSDVDKLFIQLVQTYNQLFEENPINASGVDAKAILSARLSKSRRLENLIAQLPGEKKNGLFGNLIALSLGLTPNFKSNFDLAEDAKLQLSKDTYDDDLDNLLAQIGDQYADLFLAAKNLSDAILLSDILRVNTEITKAPLSASMIKRYDEHHQDLTLLKALVRQQLPEKYKEIFFDQSKNGYAGYIDGGASQEEFYKFIKPILEKMDGTEELLVKLNREDLLRKQRTFDNGSIPHQIHLGELHAILRRQEDFYPFLKDNREKIEKILTFRIPYYVGPLARGNSRFAWMTRKSEETITPWNFEEVVDKGASAQSFIERMTNFDKNLPNEKVLPKHSLLYEYFTVYNELTKVKYVTEGMRKPAFLSGEQKKAIVDLLFKTNRKVTVKQLKEDYFKKIECFDSVEISGVEDRFNASLGTYHDLLKIIKDKDFLDNEENEDILEDIVLTLTLFEDREMIEERLKTYAHLFDDKVMKQLKRRRYTGWGRLSRKLINGIRDKQSGKTILDFLKSDGFANRNFMQLIHDDSLTFKEDIQKAQVSGQGDSLHEHIANLAGSPAIKKGILQTVKVVDELVKVMGRHKPENIVIEMARENQTTQKGQKNSRERMKRIEEGIKELGSQILKEHPVENTQLQNEKLYLYYLQNGRDMYVDQELDINRLSDYDVDHIVPQSFLKDDSIDNKVLTRSDKARGKSDNVPSEEVVKKMKNYWRQLLNAKLITQRKFDNLTKAERGGLSELDKAGFIKRQLVETRQITKHVAQILDSRMNTKYDENDKLIREVKVITLKSKLVSDFRKDFQFYKVREINNYHHAHDAYLNAVVGTALIKKYPKLESEFVYGDYKVYDVRKMIAKSEQEIGKATAKYFFYSNIMNFFKTEITLANGEIRKRPLIETNGETGEIVWDKGRDFATVRKVLSMPQVNIVKKTEVQTGGFSKESILPKRNSDKLIARKKDWDPKKYGGFDSPTVAYSVLVVAKVEKGKSKKLKSVKELLGITIMERSSFEKNPIDFLEAKGYKEVKKDLIIKLPKYSLFELENGRKRMLASAGELQKGNELALPSKYVNFLYLASHYEKLKGSPEDNEQKQLFVEQHKHYLDEIIEQISEFSKRVILADANLDKVLSAYNKHRDKPIREQAENIIHLFTLTNLGAPAAFKYFDTTIDRKRYTSTKEVLDATLIHQSITGLYETRIDLSQLGGDGGGGGPAPGSSGGTLNIEDEYRLHETSKEPDVSLGSTWLSDFPQAWAETGGMGLAVRQAPLIIPLKATSTPVSIKQYPMSQEARLGIKPHIQRLLDQGILVPCQSPWNTPLLPVKKPGTNDYRPVQDLREVNKRVEDIHPTVPNPYNLLSGLPPSHQWYTVLDLKDAFFCLRLHPTSQPLFAFEWRDPEMGISGQLTWTRLPQGFKNSPTLFNEALHRDLAGFRIQHPDLILLQYVDDLLLAATSELDCQQGTRALLQTLGDLGYRASAKKAQICQKQVKYLGYLLKEGQRWLTEARKETVMGQPIPKTPRQLREFLGKAGFCRLFIPGFAEMAAPLYPLTKPGTLFNWGPDQQKAFQEIKQALLTAPALGLPDLTKPFELFVDEKQGYAKGVLTQKLGPWRRPVAYLSKKLDPVAAGWPPCLRMVAAIAVLTKDAGKLTMGQPLVILAPHAVEALVKQPPDRWLSNARMTHYQALLLDTDRVQFGPVVALNPATLLPLPEEGLQHDCLDILAEAHGTRSDLMDQPLPDADHTWYTDGSSFLQEGQRKAGAAVTTETEVIWARALPAGTSAQRAELIALTQALKMAEGKKLNVYTDSRYAFATAHIHGEIYRRRGWLTSEGKEIKNKDEILALLKALFLPKRLSIIHCPGHQKGNSAEARGNRMADQAAREVATRETPETSTLLAGKRTADGSEFEKRTADGSEFESPKKKAKVE

SEQ ID NO: 7373 - protein, 2094 aa, synthetic construct
MPAAKRVKLDGGDKKYSIGLDIGTNSVGWAVITDEYKVPSKKFKVLGNTDRHSIKKNLIGALLFDSGETAEATRLKRTARRRYTRRKNRICYLQEIFSNEMAKVDDSFFHRLEESFLVEEDKKHERHPIFGNIVDEVAYHEKYPTIYHLRKKLVDSTDKADLRLIYLALAHMIKFRGHFLIEGDLNPDNSDVDKLFIQLVQTYNQLFEENPINASGVDAKAILSARLSKSRRLENLIAQLPGEKKNGLFGNLIALSLGLTPNFKSNFDLAEDAKLQLSKDTYDDDLDNLLAQIGDQYADLFLAAKNLSDAILLSDILRVNTEITKAPLSASMIKRYDEHHQDLTLLKALVRQQLPEKYKEIFFDQSKNGYAGYIDGGASQEEFYKFIKPILEKMDGTEELLVKLNREDLLRKQRTFDNGSIPHQIHLGELHAILRRQEDFYPFLKDNREKIEKILTFRIPYYVGPLARGNSRFAWMTRKSEETITPWNFEEVVDKGASAQSFIERMTNFDKNLPNEKVLPKHSLLYEYFTVYNELTKVKYVTEGMRKPAFLSGEQKKAIVDLLFKTNRKVTVKQLKEDYFKKIECFDSVEISGVEDRFNASLGTYHDLLKIIKDKDFLDNEENEDILEDIVLTLTLFEDREMIEERLKTYAHLFDDKVMKQLKRRRYTGWGRLSRKLINGIRDKQSGKTILDFLKSDGFANRNFMQLIHDDSLTFKEDIQKAQVSGQGDSLHEHIANLAGSPAIKKGILQTVKVVDELVKVMGRHKPENIVIEMARENQTTQKGQKNSRERMKRIEEGIKELGSQILKEHPVENTQLQNEKLYLYYLQNGRDMYVDQELDINRLSDYDVDHIVPQSFLKDDSIDNKVLTRSDKARGKSDNVPSEEVVKKMKNYWRQLLNAKLITQRKFDNLTKAERGGLSELDKAGFIKRQLVETRQITKHVAQILDSRMNTKYDENDKLIREVKVITLKSKLVSDFRKDFQFYKVREINNYHHAHDAYLNAVVGTALIKKYPKLESEFVYGDYKVYDVRKMIAKSEQEIGKATAKYFFYSNIMNFFKTEITLANGEIRKRPLIETNGETGEIVWDKGRDFATVRKVLSMPQVNIVKKTEVQTGGFSKESILPKRNSDKLIARKKDWDPKKYGGFDSPTVAYSVLVVAKVEKGKSKKLKSVKELLGITIMERSSFEKNPIDFLEAKGYKEVKKDLIIKLPKYSLFELENGRKRMLASAGELQKGNELALPSKYVNFLYLASHYEKLKGSPEDNEQKQLFVEQHKHYLDEIIEQISEFSKRVILADANLDKVLSAYNKHRDKPIREQAENIIHLFTLTNLGAPAAFKYFDTTIDRKRYTSTKEVLDATLIHQSITGLYETRIDLSQLGGDGGGGGPAPGSSGGTLNIEDEYRLHETSKGPDVPLGSTWLSDFPQAWAETGGMGLAFRQAPLIISLKATSTPVSIKQYPMSQEARLGIKPHIQRLLDQGILVPCQSPWNTPLLPVKKPGTNDYRPVQDLREVNKRVEDIHPTVPNPYNLLSGLPPSHQWYTVLDLKDAFFCLRLHPTSQSLFAFEWKDPEMGISGQLTWTRLPQGFKNSPTLFNEALHRDLADFRIQHPDLILLQYVDDLLLAATSELDCQQGTRALLQTLGDLGYRASAKKAQICQKQVKYLGYLLKEGQRWLTEARKETVMGQPTPKTPRQLREFLGKAGLCRLFIPGFAEMAAPLYPLTKPGTLFKWGPDQQKAYQEIKQALLTAPALGLPDLTKPFELFVDEKQGYAKGVLTQKLGPWRRPVAYLSKKLDPVAAGWPPCLRMVAAIAVLTKDVGKLTMGQPLVILAPHAVEALVKQPPDRWLSNARMTHYQALLLDTDRVQFGPIVALNPATLLPLPEEGLQHDCLDILAEAHGTRPDLTDQPLPDADHTWYTDGSSFLQEGQRRAGAAVTTETEVIWAKALPAGTSAQRAELIALTQALKMAAGKKLNVYTDSRYAFATAHIHGEIYRRRGWLTSEGKEIKNKDEILALLKALFLPKRLSIIHCPGHQKGNHAEARGNRMADQAAREVATRETPETSTLLAGKRTADGSEFEKRTADGSEFESPKKKAKVE

SEQ ID NO: 7374 - protein, 2094 aa, synthetic construct
MPAAKRVKLDGGDKKYSIGLDIGTNSVGWAVITDEYKVPSKKFKVLGNTDRHSIKKNLIGALLFDSGETAEATRLKRTARRRYTRRKNRICYLQEIFSNEMAKVDDSFFHRLEESFLVEEDKKHERHPIFGNIVDEVAYHEKYPTIYHLRKKLVDSTDKADLRLIYLALAHMIKFRGHFLIEGDLNPDNSDVDKLFIQLVQTYNQLFEENPINASGVDAKAILSARLSKSRRLENLIAQLPGEKKNGLFGNLIALSLGLTPNFKSNFDLAEDAKLQLSKDTYDDDLDNLLAQIGDQYADLFLAAKNLSDAILLSDILRVNTEITKAPLSASMIKRYDEHHQDLTLLKALVRQQLPEKYKEIFFDQSKNGYAGYIDGGASQEEFYKFIKPILEKMDGTEELLVKLNREDLLRKQRTFDNGSIPHQIHLGELHAILRRQEDFYPFLKDNREKIEKILTFRIPYYVGPLARGNSRFAWMTRKSEETITPWNFEEVVDKGASAQSFIERMTNFDKNLPNEKVLPKHSLLYEYFTVYNELTKVKYVTEGMRKPAFLSGEQKKAIVDLLFKTNRKVTVKQLKEDYFKKIECFDSVEISGVEDRFNASLGTYHDLLKIIKDKDFLDNEENEDILEDIVLTLTLFEDREMIEERLKTYAHLFDDKVMKQLKRRRYTGWGRLSRKLINGIRDKQSGKTILDFLKSDGFANRNFMQLIHDDSLTFKEDIQKAQVSGQGDSLHEHIANLAGSPAIKKGILQTVKVVDELVKVMGRHKPENIVIEMARENQTTQKGQKNSRERMKRIEEGIKELGSQILKEHPVENTQLQNEKLYLYYLQNGRDMYVDQELDINRLSDYDVDHIVPQSFLKDDSIDNKVLTRSDKARGKSDNVPSEEVVKKMKNYWRQLLNAKLITQRKFDNLTKAERGGLSELDKAGFIKRQLVETRQITKHVAQILDSRMNTKYDENDKLIREVKVITLKSKLVSDFRKDFQFYKVREINNYHHAHDAYLNAVVGTALIKKYPKLESEFVYGDYKVYDVRKMIAKSEQEIGKATAKYFFYSNIMNFFKTEITLANGEIRKRPLIETNGETGEIVWDKGRDFATVRKVLSMPQVNIVKKTEVQTGGFSKESILPKRNSDKLIARKKDWDPKKYGGFDSPTVAYSVLVVAKVEKGKSKKLKSVKELLGITIMERSSFEKNPIDFLEAKGYKEVKKDLIIKLPKYSLFELENGRKRMLASAGELQKGNELALPSKYVNFLYLASHYEKLKGSPEDNEQKQLFVEQHKHYLDEIIEQISEFSKRVILADANLDKVLSAYNKHRDKPIREQAENIIHLFTLTNLGAPAAFKYFDTTIDRKRYTSTKEVLDATLIHQSITGLYETRIDLSQLGGDGGGGGPAPGSSGGTLNIEDEYRLHETSKGPDVPLGSTWLSDFPQAWAETGGMGLAVRQAPLIIPLKATSTPVSIKQYPMSQEARLGIKPHIQRLLDQGILVPCQSPWNTPLLPVKKPGTNDYRPVQDLREVNKRVEDIHPTVPNPYNLLSGLPPSHQWYTVLDLKDAFFCLRLHPTSQSLFAFEWRDPEMGISGQLTWTRLPQGFKNSPTLFNEALHRDLADFRIQHPDLILLQYVDDLLLAATSELDCQQGTRALLQTLGDLGYRASAKKAQICQKQVKYLGYLLKEGQRWLTEARKETVMGQPTPKTPRQLREFLGTAGFCRLWIPGFAEMAAPLYPLTKPGTLFEWGPDQQKAYQEIKQALLTAPALGLPDLTKPFELFVDEKQGYAKGVLTQKLGPWRRPVAYLSKKLDPVAAGWPPCLRMVAAIAVLTKDAGKLTMGQPLVILAPHAVEALVKQPPDRWLSNARMTHYQALLLDTDRVQFGPIVALNPATLLPLPEEGLQHDCLDILAEAHGTRPDLTDQPLPDADHTWYTDGSSFLQEGQRKAGAAVTTETEVVWAKALPAGTSAQRAELIALTQALKMAEGKKLNVYTDSRYAFATAHIHGEIYRRRGWLTSEGKEIKNKDEILALLKALFLPKRLSIIHCPGHQKGNRAEARGNRMADQAAREVATRETPETSTLLAGKRTADGSEFEKRTADGSEFESPKKKAKVE

SEQ ID NO: 7375 - protein, 2094 aa, synthetic construct
MPAAKRVKLDGGDKKYSIGLDIGTNSVGWAVITDEYKVPSKKFKVLGNTDRHSIKKNLIGALLFDSGETAEATRLKRTARRRYTRRKNRICYLQEIFSNEMAKVDDSFFHRLEESFLVEEDKKHERHPIFGNIVDEVAYHEKYPTIYHLRKKLVDSTDKADLRLIYLALAHMIKFRGHFLIEGDLNPDNSDVDKLFIQLVQTYNQLFEENPINASGVDAKAILSARLSKSRRLENLIAQLPGEKKNGLFGNLIALSLGLTPNFKSNFDLAEDAKLQLSKDTYDDDLDNLLAQIGDQYADLFLAAKNLSDAILLSDILRVNTEITKAPLSASMIKRYDEHHQDLTLLKALVRQQLPEKYKEIFFDQSKNGYAGYIDGGASQEEFYKFIKPILEKMDGTEELLVKLNREDLLRKQRTFDNGSIPHQIHLGELHAILRRQEDFYPFLKDNREKIEKILTFRIPYYVGPLARGNSRFAWMTRKSEETITPWNFEEVVDKGASAQSFIERMTNFDKNLPNEKVLPKHSLLYEYFTVYNELTKVKYVTEGMRKPAFLSGEQKKAIVDLLFKTNRKVTVKQLKEDYFKKIECFDSVEISGVEDRFNASLGTYHDLLKIIKDKDFLDNEENEDILEDIVLTLTLFEDREMIEERLKTYAHLFDDKVMKQLKRRRYTGWGRLSRKLINGIRDKQSGKTILDFLKSDGFANRNFMQLIHDDSLTFKEDIQKAQVSGQGDSLHEHIANLAGSPAIKKGILQTVKVVDELVKVMGRHKPENIVIEMARENQTTQKGQKNSRERMKRIEEGIKELGSQILKEHPVENTQLQNEKLYLYYLQNGRDMYVDQELDINRLSDYDVDHIVPQSFLKDDSIDNKVLTRSDKARGKSDNVPSEEVVKKMKNYWRQLLNAKLITQRKFDNLTKAERGGLSELDKAGFIKRQLVETRQITKHVAQILDSRMNTKYDENDKLIREVKVITLKSKLVSDFRKDFQFYKVREINNYHHAHDAYLNAVVGTALIKKYPKLESEFVYGDYKVYDVRKMIAKSEQEIGKATAKYFFYSNIMNFFKTEITLANGEIRKRPLIETNGETGEIVWDKGRDFATVRKVLSMPQVNIVKKTEVQTGGFSKESILPKRNSDKLIARKKDWDPKKYGGFDSPTVAYSVLVVAKVEKGKSKKLKSVKELLGITIMERSSFEKNPIDFLEAKGYKEVKKDLIIKLPKYSLFELENGRKRMLASAGELQKGNELALPSKYVNFLYLASHYEKLKGSPEDNEQKQLFVEQHKHYLDEIIEQISEFSKRVILADANLDKVLSAYNKHRDKPIREQAENIIHLFTLTNLGAPAAFKYFDTTIDRKRYTSTKEVLDATLIHQSITGLYETRIDLSQLGGDGGGGGPAPGSSGGTLNIEDEYRLHEISTEPDVSPGSTWLSDFPQAWAETGGMGLAVRQAPLIIPLKATSTPVSIKQYPMSQEAKLGIKPHIQRLLDQGILVPCQSPWNTPLLPVKKPGTNDYRPVQGLREVNKRVEDIHPTVPNPYNLLSGLPTSHRWYTVLDLKDAFFCLRLHPTSQPLFASEWRDPGMGISGQLTWTRLPQGFKNSPTLFDEALHRGLADFRIQHPDLILLQYVDDLLLAATSELDCQQGTRALLKTLGNLGYRASAKKAQICQKQVKYLGYLLREGQRWLTEARKETVMGQPTPKTPRQLREFLGTAGFCRLWIPRFAEMAAPLYPLTKTGTLFNWGPDQQKAYHEIKQALLTAPALGLPDLTKPFELFVDEKQGYAKGVLTQKLGPWRRPVAYLSKKLDPVAAGWPPCLRMVAAIAVLTKDAGKLTMGQPLVILAPHAVEALVKQPPDRWLSNARMTHYQAMLLDTDRVQFGPVVALNPATLLPLPEEGAPHDCLEILAETHGTEPDLTDQPIPDADHTWYTDGSSFLQEGQRKAGAAVTTETEVIWARALPAGTSAQRAELIALTQALKMAEGKRLNVYTDSRYAFATAHIHGEIYKRRGLLTSEGREIKNKSEILALLKALFLPKRLSIIHCLGHQKGDSAEARGNRLADQAAREAAIKTPPDTSTLLAGKRTADGSEFEKRTADGSEFESPKKKAKVE

SEQ ID NO: 7376 - protein, 2114 aa, synthetic construct
MPAAKRVKLDGGDKKYSIGLDIGTNSVGWAVITDEYKVPSKKFKVLGNTDRHSIKKNLIGALLFDSGETAEATRLKRTARRRYTRRKNRICYLQEIFSNEMAKVDDSFFHRLEESFLVEEDKKHERHPIFGNIVDEVAYHEKYPTIYHLRKKLVDSTDKADLRLIYLALAHMIKFRGHFLIEGDLNPDNSDVDKLFIQLVQTYNQLFEENPINASGVDAKAILSARLSKSRRLENLIAQLPGEKKNGLFGNLIALSLGLTPNFKSNFDLAEDAKLQLSKDTYDDDLDNLLAQIGDQYADLFLAAKNLSDAILLSDILRVNTEITKAPLSASMIKRYDEHHQDLTLLKALVRQQLPEKYKEIFFDQSKNGYAGYIDGGASQEEFYKFIKPILEKMDGTEELLVKLNREDLLRKQRTFDNGSIPHQIHLGELHAILRRQEDFYPFLKDNREKIEKILTFRIPYYVGPLARGNSRFAWMTRKSEETITPWNFEEVVDKGASAQSFIERMTNFDKNLPNEKVLPKHSLLYEYFTVYNELTKVKYVTEGMRKPAFLSGEQKKAIVDLLFKTNRKVTVKQLKEDYFKKIECFDSVEISGVEDRFNASLGTYHDLLKIIKDKDFLDNEENEDILEDIVLTLTLFEDREMIEERLKTYAHLFDDKVMKQLKRRRYTGWGRLSRKLINGIRDKQSGKTILDFLKSDGFANRNFMQLIHDDSLTFKEDIQKAQVSGQGDSLHEHIANLAGSPAIKKGILQTVKVVDELVKVMGRHKPENIVIEMARENQTTQKGQKNSRERMKRIEEGIKELGSQILKEHPVENTQLQNEKLYLYYLQNGRDMYVDQELDINRLSDYDVDHIVPQSFLKDDSIDNKVLTRSDKARGKSDNVPSEEVVKKMKNYWRQLLNAKLITQRKFDNLTKAERGGLSELDKAGFIKRQLVETRQITKHVAQILDSRMNTKYDENDKLIREVKVITLKSKLVSDFRKDFQFYKVREINNYHHAHDAYLNAVVGTALIKKYPKLESEFVYGDYKVYDVRKMIAKSEQEIGKATAKYFFYSNIMNFFKTEITLANGEIRKRPLIETNGETGEIVWDKGRDFATVRKVLSMPQVNIVKKTEVQTGGFSKESILPKRNSDKLIARKKDWDPKKYGGFDSPTVAYSVLVVAKVEKGKSKKLKSVKELLGITIMERSSFEKNPIDFLEAKGYKEVKKDLIIKLPKYSLFELENGRKRMLASAGELQKGNELALPSKYVNFLYLASHYEKLKGSPEDNEQKQLFVEQHKHYLDEIIEQISEFSKRVILADANLDKVLSAYNKHRDKPIREQAENIIHLFTLTNLGAPAAFKYFDTTIDRKRYTSTKEVLDATLIHQSITGLYETRIDLSQLGGDGGGGGPAPGSSGGWVQEISDSRPMLHIYLNGRRFLGLLNTGADKTCIAGRDWPANWPIHQTESSLQGLGMACGVARSSQPLRWQHEDKSGIIHPFVIPTLPFTLWGRDIMKDIKVRLMTDSPDDSQDLMIGAIESNLFADQISWKSDQPVWLNQWPLKQEKLQALQQLVTEQLQLGHLEESNSPWNTPVFVIKKKSGKWRLLQDLRAVNATMHDMGALQPGLPSPVAPPKGWEIIIIDLQDCFFNIKLHPEDCKRFAFSVPSPNFKRPYQRFQWKVLPQGMKNSPTLCQKFVDKAILTVRDKYQDSYIVHYMDDILLAHPSRSIVDEILTSMIQALNKHGLVVSTEKIQKYDNLKYLGTHIQGDSVSYQKLQIRTDKLRTLNDFQKLLGNINWIRPFLKLTTGELKPLFEILNPDSNPISTRKLTPEACKALQLMNERLSTARVKRLDLSQPWSLCILKTEYTPTACLWQDGVVEWIHLPHISPKVITPYDIFCTQLIIKGRHRSKELFSKDPDYIVVPYTKVQFDLLLQEKEDWPISLLGFLGEVHFHLPKDPLLTFTLQTAIIFPHMTSTTPLEKGIVIFTDGSANGRSVTYIQGREPIIKENTQNTAQQAEIVAVITAFEEVSQPFNLYTDSKYVTGLFPEIETATLSPRTKIYTELKHLQRLIHKRQEKFYIGHIRGHTGLPGPLAQGNAYADSLTRILTAGKRTADGSEFEKRTADGSEFESPKKKAKVE

SEQ ID NO: 7377 - protein, 2085 aa, synthetic construct
MPAAKRVKLDGGDKKYSIGLDIGTNSVGWAVITDEYKVPSKKFKVLGNTDRHSIKKNLIGALLFDSGETAEATRLKRTARRRYTRRKNRICYLQEIFSNEMAKVDDSFFHRLEESFLVEEDKKHERHPIFGNIVDEVAYHEKYPTIYHLRKKLVDSTDKADLRLIYLALAHMIKFRGHFLIEGDLNPDNSDVDKLFIQLVQTYNQLFEENPINASGVDAKAILSARLSKSRRLENLIAQLPGEKKNGLFGNLIALSLGLTPNFKSNFDLAEDAKLQLSKDTYDDDLDNLLAQIGDQYADLFLAAKNLSDAILLSDILRVNTEITKAPLSASMIKRYDEHHQDLTLLKALVRQQLPEKYKEIFFDQSKNGYAGYIDGGASQEEFYKFIKPILEKMDGTEELLVKLNREDLLRKQRTFDNGSIPHQIHLGELHAILRRQEDFYPFLKDNREKIEKILTFRIPYYVGPLARGNSRFAWMTRKSEETITPWNFEEVVDKGASAQSFIERMTNFDKNLPNEKVLPKHSLLYEYFTVYNELTKVKYVTEGMRKPAFLSGEQKKAIVDLLFKTNRKVTVKQLKEDYFKKIECFDSVEISGVEDRFNASLGTYHDLLKIIKDKDFLDNEENEDILEDIVLTLTLFEDREMIEERLKTYAHLFDDKVMKQLKRRRYTGWGRLSRKLINGIRDKQSGKTILDFLKSDGFANRNFMQLIHDDSLTFKEDIQKAQVSGQGDSLHEHIANLAGSPAIKKGILQTVKVVDELVKVMGRHKPENIVIEMARENQTTQKGQKNSRERMKRIEEGIKELGSQILKEHPVENTQLQNEKLYLYYLQNGRDMYVDQELDINRLSDYDVDHIVPQSFLKDDSIDNKVLTRSDKARGKSDNVPSEEVVKKMKNYWRQLLNAKLITQRKFDNLTKAERGGLSELDKAGFIKRQLVETRQITKHVAQILDSRMNTKYDENDKLIREVKVITLKSKLVSDFRKDFQFYKVREINNYHHAHDAYLNAVVGTALIKKYPKLESEFVYGDYKVYDVRKMIAKSEQEIGKATAKYFFYSNIMNFFKTEITLANGEIRKRPLIETNGETGEIVWDKGRDFATVRKVLSMPQVNIVKKTEVQTGGFSKESILPKRNSDKLIARKKDWDPKKYGGFDSPTVAYSVLVVAKVEKGKSKKLKSVKELLGITIMERSSFEKNPIDFLEAKGYKEVKKDLIIKLPKYSLFELENGRKRMLASAGELQKGNELALPSKYVNFLYLASHYEKLKGSPEDNEQKQLFVEQHKHYLDEIIEQISEFSKRVILADANLDKVLSAYNKHRDKPIREQAENIIHLFTLTNLGAPAAFKYFDTTIDRKRYTSTKEVLDATLIHQSITGLYETRIDLSQLGGDGGGGGPAPGSSGGIPWLMKKPLQLTTLVPLQEYEERLLKQTMLTGSYKEKLQSLFLKYDALWQHWENQVGHRRIKPHHIATGTVNPRPQKQYPINPKAKASIQTVINDLLKQGVLIQQNSIMNTPVYPVPKPDGKWRMVLDYREVNKTIPLIAAQNQHSAGILSSIFRGKYKTTLDLSNGFWAHSITPESYWLTAFTWLGQQYCWTRLPQGFLNSPALFNADVVDLLKEVPNVQVYVDDIYISHDDPREHLEQLEKVFSLLLNAGYVVSLKKSEIAQHEVEFLGFNITKEGRGLTETFKQKLLNITPPRDLKQLQSILGLLNFARNFIPNFSELVKPLYNIIATAPGKYITWTTDNSQQLQNIISMLNSAENLEERNPEVRLIMKVNTSPSAGYIRFYNEFAKRPIMYLNYVYTKAEVKFTNTEKLLTTIHKGLIKALDLGMGQEILVYSPIVSMTKIQKTPLPERKALPIRWITWMSYLEDPRIQFHYDKTLPELQQVPTVTDDIIAKIKHPSEFSMVFYTDGSAIKHPNVNKSHNAGMGIAQVQFKPEFTVINTWSIPLGDHTAQLAEVAAVEFACKKALKIDGPVLIVTDSFYVAESVNKELPYWQSNGFFNNKKKPLKHVSKWKSIADCIQLKPDIIIIHEKGHQPTASTFHTEGNNLADKLATQGSYVVNAGKRTADGSEFEKRTADGSEFESPKKKAKVE

SEQ ID NO: 7378 - protein, 2092 aa, synthetic construct
MPAAKRVKLDGGDKKYSIGLDIGTNSVGWAVITDEYKVPSKKFKVLGNTDRHSIKKNLIGALLFDSGETAEATRLKRTARRRYTRRKNRICYLQEIFSNEMAKVDDSFFHRLEESFLVEEDKKHERHPIFGNIVDEVAYHEKYPTIYHLRKKLVDSTDKADLRLIYLALAHMIKFRGHFLIEGDLNPDNSDVDKLFIQLVQTYNQLFEENPINASGVDAKAILSARLSKSRRLENLIAQLPGEKKNGLFGNLIALSLGLTPNFKSNFDLAEDAKLQLSKDTYDDDLDNLLAQIGDQYADLFLAAKNLSDAILLSDILRVNTEITKAPLSASMIKRYDEHHQDLTLLKALVRQQLPEKYKEIFFDQSKNGYAGYIDGGASQEEFYKFIKPILEKMDGTEELLVKLNREDLLRKQRTFDNGSIPHQIHLGELHAILRRQEDFYPFLKDNREKIEKILTFRIPYYVGPLARGNSRFAWMTRKSEETITPWNFEEVVDKGASAQSFIERMTNFDKNLPNEKVLPKHSLLYEYFTVYNELTKVKYVTEGMRKPAFLSGEQKKAIVDLLFKTNRKVTVKQLKEDYFKKIECFDSVEISGVEDRFNASLGTYHDLLKIIKDKDFLDNEENEDILEDIVLTLTLFEDREMIEERLKTYAHLFDDKVMKQLKRRRYTGWGRLSRKLINGIRDKQSGKTILDFLKSDGFANRNFMQLIHDDSLTFKEDIQKAQVSGQGDSLHEHIANLAGSPAIKKGILQTVKVVDELVKVMGRHKPENIVIEMARENQTTQKGQKNSRERMKRIEEGIKELGSQILKEHPVENTQLQNEKLYLYYLQNGRDMYVDQELDINRLSDYDVDHIVPQSFLKDDSIDNKVLTRSDKARGKSDNVPSEEVVKKMKNYWRQLLNAKLITQRKFDNLTKAERGGLSELDKAGFIKRQLVETRQITKHVAQILDSRMNTKYDENDKLIREVKVITLKSKLVSDFRKDFQFYKVREINNYHHAHDAYLNAVVGTALIKKYPKLESEFVYGDYKVYDVRKMIAKSEQEIGKATAKYFFYSNIMNFFKTEITLANGEIRKRPLIETNGETGEIVWDKGRDFATVRKVLSMPQVNIVKKTEVQTGGFSKESILPKRNSDKLIARKKDWDPKKYGGFDSPTVAYSVLVVAKVEKGKSKKLKSVKELLGITIMERSSFEKNPIDFLEAKGYKEVKKDLIIKLPKYSLFELENGRKRMLASAGELQKGNELALPSKYVNFLYLASHYEKLKGSPEDNEQKQLFVEQHKHYLDEIIEQISEFSKRVILADANLDKVLSAYNKHRDKPIREQAENIIHLFTLTNLGAPAAFKYFDTTIDRKRYTSTKEVLDATLIHQSITGLYETRIDLSQLGGDGGGGGPAPGSSGGVLNLEEEYRLHEKPVPSSIDPSWLQLFPTVWAERAGMGLANQVPPVVVELRSGASPVAVRQYPMSKEAREGIRPHIQRFLDLGVLVPCQSPWNTPLLPVKKPGTNDYRPVQDLREINKRVQDIHPTVPNPYNLLSSLPPSHTWYSVLDLKDAFFCLKLHPNSQPLFAFEWRDPEKGNTGQLTWTRLPQGFKNSPTLFNEALHRDLAPFRALNPQVVLLQYVDDLLVAAPTYRDCKEGTQKLLQELSKLGYRVSAKKAQLCQKEVTYLGYLLKEGKRWLTPARKATVMKIPPPTTPRQVREFLGTAGFCRLWIPGFASLAAPLYPLTKPSIPFIWTEEHQKAFDRIKEALLSAPALALPDLTKPFTLYVDERAGVARGVLTQTLGPWRRPVAYLSKKLDPVASGWPTCLKAVAAVALLLKDADKLTLGQNVTVIASHSLESIVRQPPDRWMTNARMTHYQSLLLNERVSFAPPAVLNPATLLPVESEATPVHRCSEILAEETGTRRDLKDQPLPGVPAWYTDGSSFIAEGKRRAGAAIVDGKRTVWASSLPEGTSAQKAELVALTQALRLAEGKDINIYTDSRYAFATAHIHGAIYKQRGWLTSAGKDIKNKEEILALLEAIHLPKRVAIIHCPGHQKGNDPVATGNRRADEAAKQAALSTRVLAETTKPAGKRTADGSEFEKRTADGSEFESPKKKAKVE

SEQ ID NO: 7379 - protein, 2096 aa, synthetic construct
MPAAKRVKLDGGDKKYSIGLDIGTNSVGWAVITDEYKVPSKKFKVLGNTDRHSIKKNLIGALLFDSGETAEATRLKRTARRRYTRRKNRICYLQEIFSNEMAKVDDSFFHRLEESFLVEEDKKHERHPIFGNIVDEVAYHEKYPTIYHLRKKLVDSTDKADLRLIYLALAHMIKFRGHFLIEGDLNPDNSDVDKLFIQLVQTYNQLFEENPINASGVDAKAILSARLSKSRRLENLIAQLPGEKKNGLFGNLIALSLGLTPNFKSNFDLAEDAKLQLSKDTYDDDLDNLLAQIGDQYADLFLAAKNLSDAILLSDILRVNTEITKAPLSASMIKRYDEHHQDLTLLKALVRQQLPEKYKEIFFDQSKNGYAGYIDGGASQEEFYKFIKPILEKMDGTEELLVKLNREDLLRKQRTFDNGSIPHQIHLGELHAILRRQEDFYPFLKDNREKIEKILTFRIPYYVGPLARGNSRFAWMTRKSEETITPWNFEEVVDKGASAQSFIERMTNFDKNLPNEKVLPKHSLLYEYFTVYNELTKVKYVTEGMRKPAFLSGEQKKAIVDLLFKTNRKVTVKQLKEDYFKKIECFDSVEISGVEDRFNASLGTYHDLLKIIKDKDFLDNEENEDILEDIVLTLTLFEDREMIEERLKTYAHLFDDKVMKQLKRRRYTGWGRLSRKLINGIRDKQSGKTILDFLKSDGFANRNFMQLIHDDSLTFKEDIQKAQVSGQGDSLHEHIANLAGSPAIKKGILQTVKVVDELVKVMGRHKPENIVIEMARENQTTQKGQKNSRERMKRIEEGIKELGSQILKEHPVENTQLQNEKLYLYYLQNGRDMYVDQELDINRLSDYDVDHIVPQSFLKDDSIDNKVLTRSDKARGKSDNVPSEEVVKKMKNYWRQLLNAKLITQRKFDNLTKAERGGLSELDKAGFIKRQLVETRQITKHVAQILDSRMNTKYDENDKLIREVKVITLKSKLVSDFRKDFQFYKVREINNYHHAHDAYLNAVVGTALIKKYPKLESEFVYGDYKVYDVRKMIAKSEQEIGKATAKYFFYSNIMNFFKTEITLANGEIRKRPLIETNGETGEIVWDKGRDFATVRKVLSMPQVNIVKKTEVQTGGFSKESILPKRNSDKLIARKKDWDPKKYGGFDSPTVAYSVLVVAKVEKGKSKKLKSVKELLGITIMERSSFEKNPIDFLEAKGYKEVKKDLIIKLPKYSLFELENGRKRMLASAGELQKGNELALPSKYVNFLYLASHYEKLKGSPEDNEQKQLFVEQHKHYLDEIIEQISEFSKRVILADANLDKVLSAYNKHRDKPIREQAENIIHLFTLTNLGAPAAFKYFDTTIDRKRYTSTKEVLDATLIHQSITGLYETRIDLSQLGGDGGGSSGGGPAPGGTAPLEEEYRLFLEAPIQNVTLLEQWKREIPKVWAEINPPGLASTQAPIHVQLLSTALPVRVRQYPITLEAKRSLRETIRKFRAAGILRPVHSPWNTPLLPVRKSGTSEYRMVQDLREVNKRVETIHPTVPNPYTLLSLLPPDRIWYSVLDLKDAFFCIPLAPESQLIFAFEWADAEEGESGQLTWTRLPQGFKNSPTLFDEALNRDLQGFRLDHPSVSLLQYVDDLLIAADTQAACLSATRDLLMTLAELGYRVSGKKAQLCQEEVTYLGFKIHKGSRSLSNSRTQAILQIPVPKTKRQVREFLGTIGYCRLWIPGFAELAQPLYAATRGGNDPLVWGEKEEEAFQSLKLALTQPPALALPSLDKPFQLFVEETSGAAKGVLTQALGPWKRPVAYLSKRLDPVAAGWPRCLRAIAAAALLTREASKLTFGQDIEITSSHNLESLLRSPPDKWLTNARITQYQVLLLDPPRVRFKQTAALNPATLLPETDDTLPIHHCLDTLDSLTSTRPDLTDQPLAQAEATLFTDGSSYIRDGKRYAGAAVVTLDSVIWAEPLPIGTSAQKAELIALTKALEWSKDKSVNIYTDSRYAFATLHVHGMIYRERGLLTAGGKAIKNAPEILALLTAVWLPKRVAVMHCKGHQKDDAPTSTGNRRADEVAREVAIRPLSTQATISAGKRTADGSEFEKRTADGSEFESPKKKAKVE

SEQ ID NO: 7380 - protein, 2096 aa, synthetic construct
MPAAKRVKLDGGDKKYSIGLDIGTNSVGWAVITDEYKVPSKKFKVLGNTDRHSIKKNLIGALLFDSGETAEATRLKRTARRRYTRRKNRICYLQEIFSNEMAKVDDSFFHRLEESFLVEEDKKHERHPIFGNIVDEVAYHEKYPTIYHLRKKLVDSTDKADLRLIYLALAHMIKFRGHFLIEGDLNPDNSDVDKLFIQLVQTYNQLFEENPINASGVDAKAILSARLSKSRRLENLIAQLPGEKKNGLFGNLIALSLGLTPNFKSNFDLAEDAKLQLSKDTYDDDLDNLLAQIGDQYADLFLAAKNLSDAILLSDILRVNTEITKAPLSASMIKRYDEHHQDLTLLKALVRQQLPEKYKEIFFDQSKNGYAGYIDGGASQEEFYKFIKPILEKMDGTEELLVKLNREDLLRKQRTFDNGSIPHQIHLGELHAILRRQEDFYPFLKDNREKIEKILTFRIPYYVGPLARGNSRFAWMTRKSEETITPWNFEEVVDKGASAQSFIERMTNFDKNLPNEKVLPKHSLLYEYFTVYNELTKVKYVTEGMRKPAFLSGEQKKAIVDLLFKTNRKVTVKQLKEDYFKKIECFDSVEISGVEDRFNASLGTYHDLLKIIKDKDFLDNEENEDILEDIVLTLTLFEDREMIEERLKTYAHLFDDKVMKQLKRRRYTGWGRLSRKLINGIRDKQSGKTILDFLKSDGFANRNFMQLIHDDSLTFKEDIQKAQVSGQGDSLHEHIANLAGSPAIKKGILQTVKVVDELVKVMGRHKPENIVIEMARENQTTQKGQKNSRERMKRIEEGIKELGSQILKEHPVENTQLQNEKLYLYYLQNGRDMYVDQELDINRLSDYDVDHIVPQSFLKDDSIDNKVLTRSDKARGKSDNVPSEEVVKKMKNYWRQLLNAKLITQRKFDNLTKAERGGLSELDKAGFIKRQLVETRQITKHVAQILDSRMNTKYDENDKLIREVKVITLKSKLVSDFRKDFQFYKVREINNYHHAHDAYLNAVVGTALIKKYPKLESEFVYGDYKVYDVRKMIAKSEQEIGKATAKYFFYSNIMNFFKTEITLANGEIRKRPLIETNGETGEIVWDKGRDFATVRKVLSMPQVNIVKKTEVQTGGFSKESILPKRNSDKLIARKKDWDPKKYGGFDSPTVAYSVLVVAKVEKGKSKKLKSVKELLGITIMERSSFEKNPIDFLEAKGYKEVKKDLIIKLPKYSLFELENGRKRMLASAGELQKGNELALPSKYVNFLYLASHYEKLKGSPEDNEQKQLFVEQHKHYLDEIIEQISEFSKRVILADANLDKVLSAYNKHRDKPIREQAENIIHLFTLTNLGAPAAFKYFDTTIDRKRYTSTKEVLDATLIHQSITGLYETRIDLSQLGGDGGGSSGGGPAPGGTAPLEEEYRLFLEAPIQNVTLLEQWKREIPKVWAEINPPGLASTQAPIHVQLLSTALPVRVRQYPITLEAKRSLRETIRKFRAAGILRPVHSPWNTPLLPVRKSGTSEYRMVQDLREVNKRVETIHPTVPNPYTLLSLLPPDRIWYSVLDLKDAFFCIPLAPESQLIFAFEWADAEEGESGQLTWTRLPQGFKNSPTLFNEALNRDLQGFRLDHPSVSLLQYVDDLLIAADTQAACLSATRDLLMTLAELGYRVSGKKAQLCQEEVTYLGFKIHKGSRSLSNSRTQAILQIPVPKTKRQVREFLGTIGYCRLWIPGFAELAQPLYAATRPGNDPLVWGEKEEEAFQSLKLALTQPPALALPSLDKPFQLFVEETSGAAKGVLTQALGPWKRPVAYLSKRLDPVAAGWPRCLRAIAAAALLTREASKLTFGQDIEITSSHNLESLLRSPPDKWLTNARITQYQVLLLDPPRVRFKQTAALNPATLLPETDDTLPIHHCLDTLDSLTSTRPDLTDQPLAQAEATLFTDGSSYIRDGKRYAGAAVVTLDSVIWAEPLPIGTSAQKAELIALTKALEWSKDKSVNIYTDSRYAFATLHVHGMIYRERGWLTAGGKAIKNAPEILALLTAVWLPKRVAVMHCKGHQKDDAPTSTGNRRADEVAREVAIRPLSTQATISAGKRTADGSEFEKRTADGSEFESPKKKAKVE

SEQ ID NO: 7381 - protein, 2096 aa, synthetic construct
MPAAKRVKLDGGDKKYSIGLDIGTNSVGWAVITDEYKVPSKKFKVLGNTDRHSIKKNLIGALLFDSGETAEATRLKRTARRRYTRRKNRICYLQEIFSNEMAKVDDSFFHRLEESFLVEEDKKHERHPIFGNIVDEVAYHEKYPTIYHLRKKLVDSTDKADLRLIYLALAHMIKFRGHFLIEGDLNPDNSDVDKLFIQLVQTYNQLFEENPINASGVDAKAILSARLSKSRRLENLIAQLPGEKKNGLFGNLIALSLGLTPNFKSNFDLAEDAKLQLSKDTYDDDLDNLLAQIGDQYADLFLAAKNLSDAILLSDILRVNTEITKAPLSASMIKRYDEHHQDLTLLKALVRQQLPEKYKEIFFDQSKNGYAGYIDGGASQEEFYKFIKPILEKMDGTEELLVKLNREDLLRKQRTFDNGSIPHQIHLGELHAILRRQEDFYPFLKDNREKIEKILTFRIPYYVGPLARGNSRFAWMTRKSEETITPWNFEEVVDKGASAQSFIERMTNFDKNLPNEKVLPKHSLLYEYFTVYNELTKVKYVTEGMRKPAFLSGEQKKAIVDLLFKTNRKVTVKQLKEDYFKKIECFDSVEISGVEDRFNASLGTYHDLLKIIKDKDFLDNEENEDILEDIVLTLTLFEDREMIEERLKTYAHLFDDKVMKQLKRRRYTGWGRLSRKLINGIRDKQSGKTILDFLKSDGFANRNFMQLIHDDSLTFKEDIQKAQVSGQGDSLHEHIANLAGSPAIKKGILQTVKVVDELVKVMGRHKPENIVIEMARENQTTQKGQKNSRERMKRIEEGIKELGSQILKEHPVENTQLQNEKLYLYYLQNGRDMYVDQELDINRLSDYDVDHIVPQSFLKDDSIDNKVLTRSDKARGKSDNVPSEEVVKKMKNYWRQLLNAKLITQRKFDNLTKAERGGLSELDKAGFIKRQLVETRQITKHVAQILDSRMNTKYDENDKLIREVKVITLKSKLVSDFRKDFQFYKVREINNYHHAHDAYLNAVVGTALIKKYPKLESEFVYGDYKVYDVRKMIAKSEQEIGKATAKYFFYSNIMNFFKTEITLANGEIRKRPLIETNGETGEIVWDKGRDFATVRKVLSMPQVNIVKKTEVQTGGFSKESILPKRNSDKLIARKKDWDPKKYGGFDSPTVAYSVLVVAKVEKGKSKKLKSVKELLGITIMERSSFEKNPIDFLEAKGYKEVKKDLIIKLPKYSLFELENGRKRMLASAGELQKGNELALPSKYVNFLYLASHYEKLKGSPEDNEQKQLFVEQHKHYLDEIIEQISEFSKRVILADANLDKVLSAYNKHRDKPIREQAENIIHLFTLTNLGAPAAFKYFDTTIDRKRYTSTKEVLDATLIHQSITGLYETRIDLSQLGGDGGGSSGGGPAPGGTAPLEEEYRLFLEAPIQNVTLLEQWKREIPKVWAEINPPGLASTQAPIHVQLLSTALPVRVRQYPITLEAKRSLRETIRKFRAAGILRPVHSPWNTPLLPVRKSGTSEYRMVQDLREVNKRVETIHPTVPNPYTLLSLLPPDRIWYSVLDLKDAFFCIPLAPESQLIFAFEWADAEEGESGQLTWTRLPQGFKNSPTLFNEALNRDLQGFRLDHPSVSLLQYVDDLLIAADTQAACLSATRDLLMTLAELGYRVSGKKAQLCQEEVTYLGFKIHKGSRSLSNSRTQAILQIPVPKTKRQVREFLGKIGYCRLFIPGFAELAQPLYAATRPGNDPLVWGEKEEEAFQSLKLALTQPPALALPSLDKPFQLFVEETSGAAKGVLTQALGPWKRPVAYLSKRLDPVAAGWPRCLRAIAAAALLTREASKLTFGQDIEITSSHNLESLLRSPPDKWLTNARITQYQVLLLDPPRVRFKQTAALNPATLLPETDDTLPIHHCLDTLDSLTSTRPDLTDQPLAQAEATLFTDGSSYIRDGKRYAGAAVVTLDSVIWAEPLPIGTSAQKAELIALTKALEWSKDKSVNIYTDSRYAFATLHVHGMIYRERGWLTAGGKAIKNAPEILALLTAVWLPKRVAVMHCKGHQKDDAPTSTGNRRADEVAREVAIRPLSTQATISAGKRTADGSEFEKRTADGSEFESPKKKAKVE

SEQ ID NO: 7382 - protein, 2100 aa, synthetic construct
MPAAKRVKLDGGDKKYSIGLDIGTNSVGWAVITDEYKVPSKKFKVLGNTDRHSIKKNLIGALLFDSGETAEATRLKRTARRRYTRRKNRICYLQEIFSNEMAKVDDSFFHRLEESFLVEEDKKHERHPIFGNIVDEVAYHEKYPTIYHLRKKLVDSTDKADLRLIYLALAHMIKFRGHFLIEGDLNPDNSDVDKLFIQLVQTYNQLFEENPINASGVDAKAILSARLSKSRRLENLIAQLPGEKKNGLFGNLIALSLGLTPNFKSNFDLAEDAKLQLSKDTYDDDLDNLLAQIGDQYADLFLAAKNLSDAILLSDILRVNTEITKAPLSASMIKRYDEHHQDLTLLKALVRQQLPEKYKEIFFDQSKNGYAGYIDGGASQEEFYKFIKPILEKMDGTEELLVKLNREDLLRKQRTFDNGSIPHQIHLGELHAILRRQEDFYPFLKDNREKIEKILTFRIPYYVGPLARGNSRFAWMTRKSEETITPWNFEEVVDKGASAQSFIERMTNFDKNLPNEKVLPKHSLLYEYFTVYNELTKVKYVTEGMRKPAFLSGEQKKAIVDLLFKTNRKVTVKQLKEDYFKKIECFDSVEISGVEDRFNASLGTYHDLLKIIKDKDFLDNEENEDILEDIVLTLTLFEDREMIEERLKTYAHLFDDKVMKQLKRRRYTGWGRLSRKLINGIRDKQSGKTILDFLKSDGFANRNFMQLIHDDSLTFKEDIQKAQVSGQGDSLHEHIANLAGSPAIKKGILQTVKVVDELVKVMGRHKPENIVIEMARENQTTQKGQKNSRERMKRIEEGIKELGSQILKEHPVENTQLQNEKLYLYYLQNGRDMYVDQELDINRLSDYDVDHIVPQSFLKDDSIDNKVLTRSDKARGKSDNVPSEEVVKKMKNYWRQLLNAKLITQRKFDNLTKAERGGLSELDKAGFIKRQLVETRQITKHVAQILDSRMNTKYDENDKLIREVKVITLKSKLVSDFRKDFQFYKVREINNYHHAHDAYLNAVVGTALIKKYPKLESEFVYGDYKVYDVRKMIAKSEQEIGKATAKYFFYSNIMNFFKTEITLANGEIRKRPLIETNGETGEIVWDKGRDFATVRKVLSMPQVNIVKKTEVQTGGFSKESILPKRNSDKLIARKKDWDPKKYGGFDSPTVAYSVLVVAKVEKGKSKKLKSVKELLGITIMERSSFEKNPIDFLEAKGYKEVKKDLIIKLPKYSLFELENGRKRMLASAGELQKGNELALPSKYVNFLYLASHYEKLKGSPEDNEQKQLFVEQHKHYLDEIIEQISEFSKRVILADANLDKVLSAYNKHRDKPIREQAENIIHLFTLTNLGAPAAFKYFDTTIDRKRYTSTKEVLDATLIHQSITGLYETRIDLSQLGGDGGGSSGGGPAPGGTVSLQDEHRLFDIPVTTSLPDVWLQDFPQAWAETGGLGRAKCQAPIIIDLKPTAVPVSIKQYPMSLEAHMGIRQHIIKFLELGVLRPCRSPWNTPLLPVKKPGTQDYRPVQDLREINKRTVDIHPTVPNPYNLLSTLKPDYSWYTVLDLKDAFFCLPLAPQSQELFAFEWKDPERGISGQLTWTRLPQGFKNSPTLFNEALHRDLTDFRTQHPEVTLLQYVDDLLLAAPTKKACTQGTRHLLQELGEKGYRASAKKAQICQTKVTYLGYILSEGKRWLTPGRIETVARIPPPRNPREVREFLGTAGFCRLWIPGFAELAAPLYALTKPSTPFTWQTEHQLAFEALKKALLSAPALGLPDTSKPFTLFLDERQGIAKGVLTQKLGPWKRPVAYLSKKLDPVAAGWPPCLRIMAATAMLVKDSAKLTLGQPLTVITPHTLEAIVRQPPDRWITNARLTHYQALLLDTDRVQFGPPVTLNPATLLPVPENQPSPHDCRQVLAETHGTREDLKDQELPDADHTWYTDGSSYLDSGTRRAGAAVVDGHNTIWAQSLPPGTSAQKAELIALTKALELSKGKKANIYTDSRYAFATAHTHGSIYERRGWLTSEGKEIKNKAEIIALLKALFLPQEVAIIHCPGHQKGQDPVAVGNRQADRVARQAAMAEVLTLATEPDNTSHITAGKRTADGSEFEKRTADGSEFESPKKKAKVE

SEQ ID NO: 7383 - protein, 2085 aa, synthetic construct
MPAAKRVKLDGGDKKYSIGLDIGTNSVGWAVITDEYKVPSKKFKVLGNTDRHSIKKNLIGALLFDSGETAEATRLKRTARRRYTRRKNRICYLQEIFSNEMAKVDDSFFHRLEESFLVEEDKKHERHPIFGNIVDEVAYHEKYPTIYHLRKKLVDSTDKADLRLIYLALAHMIKFRGHFLIEGDLNPDNSDVDKLFIQLVQTYNQLFEENPINASGVDAKAILSARLSKSRRLENLIAQLPGEKKNGLFGNLIALSLGLTPNFKSNFDLAEDAKLQLSKDTYDDDLDNLLAQIGDQYADLFLAAKNLSDAILLSDILRVNTEITKAPLSASMIKRYDEHHQDLTLLKALVRQQLPEKYKEIFFDQSKNGYAGYIDGGASQEEFYKFIKPILEKMDGTEELLVKLNREDLLRKQRTFDNGSIPHQIHLGELHAILRRQEDFYPFLKDNREKIEKILTFRIPYYVGPLARGNSRFAWMTRKSEETITPWNFEEVVDKGASAQSFIERMTNFDKNLPNEKVLPKHSLLYEYFTVYNELTKVKYVTEGMRKPAFLSGEQKKAIVDLLFKTNRKVTVKQLKEDYFKKIECFDSVEISGVEDRFNASLGTYHDLLKIIKDKDFLDNEENEDILEDIVLTLTLFEDREMIEERLKTYAHLFDDKVMKQLKRRRYTGWGRLSRKLINGIRDKQSGKTILDFLKSDGFANRNFMQLIHDDSLTFKEDIQKAQVSGQGDSLHEHIANLAGSPAIKKGILQTVKVVDELVKVMGRHKPENIVIEMARENQTTQKGQKNSRERMKRIEEGIKELGSQILKEHPVENTQLQNEKLYLYYLQNGRDMYVDQELDINRLSDYDVDHIVPQSFLKDDSIDNKVLTRSDKARGKSDNVPSEEVVKKMKNYWRQLLNAKLITQRKFDNLTKAERGGLSELDKAGFIKRQLVETRQITKHVAQILDSRMNTKYDENDKLIREVKVITLKSKLVSDFRKDFQFYKVREINNYHHAHDAYLNAVVGTALIKKYPKLESEFVYGDYKVYDVRKMIAKSEQEIGKATAKYFFYSNIMNFFKTEITLANGEIRKRPLIETNGETGEIVWDKGRDFATVRKVLSMPQVNIVKKTEVQTGGFSKESILPKRNSDKLIARKKDWDPKKYGGFDSPTVAYSVLVVAKVEKGKSKKLKSVKELLGITIMERSSFEKNPIDFLEAKGYKEVKKDLIIKLPKYSLFELENGRKRMLASAGELQKGNELALPSKYVNFLYLASHYEKLKGSPEDNEQKQLFVEQHKHYLDEIIEQISEFSKRVILADANLDKVLSAYNKHRDKPIREQAENIIHLFTLTNLGAPAAFKYFDTTIDRKRYTSTKEVLDATLIHQSITGLYETRIDLSQLGGDGGGSSGGGPAPGGVPWILKKPLELTIKLDLEEQQGTLLNNSILSKKGKEELKQLFEKYSALWQSWENQVGHRRIRPHKIATGTVKPTPQKQYHINPKAKPDIQIVINDLLKQGVLIQKESTMNTPVYPVPKPNGRWRMVLDYRAVNKVTPLIAVQNQHSYGILGSLFKGRYKTTIDLSNGFWAHPIVPEDYWITAFTWQGKQYCWTVLPQGFLNSPGLFTGDVVDLLQGIPNVEVYVDDVYISHDSEKEHLEYLDILFNRLKEAGYIISLKKSNIANSIVDFLGFQITNEGRGLTDTFKEKLENITAPTTLKQLQSILGLLNFARNFIPDFTELIAPLYALIPKSTKNYVPWQIEHSTTLETLITKLNGAEYLQGRKGDKTLIMKVNASYTTGYIRYYNEGEKKPISYVSIVFSKTELKFTELEKLLTTVHKGLLKALDLSMGQNIHVYSPIVSMQNIQKTPQTAKKALASRWLSWLSYLEDPRIRFFYDPQMPALKDLPAVDTGKDNKKHPSNFQHIFYTDGSAITSPTKEGHLNAGMGIVYFINKDGNLQKQQEWSISLGNHTAQFAEIAAFEFALKKCLPLGGNILVVTDSNYVAKAYNEELDVWASNGFVNNRKKPLKHISKWKSVADLKRLRPDVVVTHEPGHQKLDSSPHAYGNNLADQLATQASFKVHAGKRTADGSEFEKRTADGSEFESPKKKAKVE

SEQ ID NO: 7384 - protein, 2093 aa, synthetic construct
MPAAKRVKLDGGDKKYSIGLDIGTNSVGWAVITDEYKVPSKKFKVLGNTDRHSIKKNLIGALLFDSGETAEATRLKRTARRRYTRRKNRICYLQEIFSNEMAKVDDSFFHRLEESFLVEEDKKHERHPIFGNIVDEVAYHEKYPTIYHLRKKLVDSTDKADLRLIYLALAHMIKFRGHFLIEGDLNPDNSDVDKLFIQLVQTYNQLFEENPINASGVDAKAILSARLSKSRRLENLIAQLPGEKKNGLFGNLIALSLGLTPNFKSNFDLAEDAKLQLSKDTYDDDLDNLLAQIGDQYADLFLAAKNLSDAILLSDILRVNTEITKAPLSASMIKRYDEHHQDLTLLKALVRQQLPEKYKEIFFDQSKNGYAGYIDGGASQEEFYKFIKPILEKMDGTEELLVKLNREDLLRKQRTFDNGSIPHQIHLGELHAILRRQEDFYPFLKDNREKIEKILTFRIPYYVGPLARGNSRFAWMTRKSEETITPWNFEEVVDKGASAQSFIERMTNFDKNLPNEKVLPKHSLLYEYFTVYNELTKVKYVTEGMRKPAFLSGEQKKAIVDLLFKTNRKVTVKQLKEDYFKKIECFDSVEISGVEDRFNASLGTYHDLLKIIKDKDFLDNEENEDILEDIVLTLTLFEDREMIEERLKTYAHLFDDKVMKQLKRRRYTGWGRLSRKLINGIRDKQSGKTILDFLKSDGFANRNFMQLIHDDSLTFKEDIQKAQVSGQGDSLHEHIANLAGSPAIKKGILQTVKVVDELVKVMGRHKPENIVIEMARENQTTQKGQKNSRERMKRIEEGIKELGSQILKEHPVENTQLQNEKLYLYYLQNGRDMYVDQELDINRLSDYDVDHIVPQSFLKDDSIDNKVLTRSDKARGKSDNVPSEEVVKKMKNYWRQLLNAKLITQRKFDNLTKAERGGLSELDKAGFIKRQLVETRQITKHVAQILDSRMNTKYDENDKLIREVKVITLKSKLVSDFRKDFQFYKVREINNYHHAHDAYLNAVVGTALIKKYPKLESEFVYGDYKVYDVRKMIAKSEQEIGKATAKYFFYSNIMNFFKTEITLANGEIRKRPLIETNGETGEIVWDKGRDFATVRKVLSMPQVNIVKKTEVQTGGFSKESILPKRNSDKLIARKKDWDPKKYGGFDSPTVAYSVLVVAKVEKGKSKKLKSVKELLGITIMERSSFEKNPIDFLEAKGYKEVKKDLIIKLPKYSLFELENGRKRMLASAGELQKGNELALPSKYVNFLYLASHYEKLKGSPEDNEQKQLFVEQHKHYLDEIIEQISEFSKRVILADANLDKVLSAYNKHRDKPIREQAENIIHLFTLTNLGAPAAFKYFDTTIDRKRYTSTKEVLDATLIHQSITGLYETRIDLSQLGGDGGGSSGGGPAPGGTLQLEEEYRLFEPESTQKQEMDIWLKNFPQAWAETGGMGTAHCQAPVLIQLKATATPISIRQYPMPHEAYQGIKPHIRRMLDQGILKPCQSPWNTPLLPVKKPGTEDYRPVQDLREVNKRVEDIHPTVPNPYNLLSTLPPSHPWYTVLDLKDAFFCLRLHSESQLLFAFEWRDPEIGLSGQLTWTRLPQGFKNSPTLFNEALHSDLADFRVRYPALVLLQYVDDLLLAAATRTECLEGTKALLETLGNKGYRASAKKAQICLQEVTYLGYSLKDGQRWLTKARKEAILSIPVPKNSRQVREFLGTAGYCRLWIPGFAELAAPLYPLTRPGTLFQWGTEQQLAFEDIKKALLSSPALGLPDITKPFELFIDENSGFAKGVLVQKLGPWKRPVAYLSKKLDTVASGWPPCLRMVAAIAILVKDAGKLTLGQPLTILTSHPVEALVRQPPNKWLSNARMTHYQAMLLDAERVHFGPTVSLNPATLLPLPSGGNHHDCLQILAETHGTRPDLTDQPLPDADLTWYTDGSSFIRNGEREAGAAVTTESEVIWAAPLPPGTSAQRAELIALTQALKMAEGKKLTVYTDSRYAFATTHVHGEIYRRRGWLTSEGKEIKNKNEILALLEALFLPKRLSIIHCPGHQKGDSPQAKGNRLADDTAKKAATETHSSLTVLPAGKRTADGSEFEKRTADGSEFESPKKKAKVE

SEQ ID NO: 7385 - protein, 2174 aa, synthetic construct
MPAAKRVKLDGGDKKYSIGLDIGTNSVGWAVITDEYKVPSKKFKVLGNTDRHSIKKNLIGALLFDSGETAEATRLKRTARRRYTRRKNRICYLQEIFSNEMAKVDDSFFHRLEESFLVEEDKKHERHPIFGNIVDEVAYHEKYPTIYHLRKKLVDSTDKADLRLIYLALAHMIKFRGHFLIEGDLNPDNSDVDKLFIQLVQTYNQLFEENPINASGVDAKAILSARLSKSRRLENLIAQLPGEKKNGLFGNLIALSLGLTPNFKSNFDLAEDAKLQLSKDTYDDDLDNLLAQIGDQYADLFLAAKNLSDAILLSDILRVNTEITKAPLSASMIKRYDEHHQDLTLLKALVRQQLPEKYKEIFFDQSKNGYAGYIDGGASQEEFYKFIKPILEKMDGTEELLVKLNREDLLRKQRTFDNGSIPHQIHLGELHAILRRQEDFYPFLKDNREKIEKILTFRIPYYVGPLARGNSRFAWMTRKSEETITPWNFEEVVDKGASAQSFIERMTNFDKNLPNEKVLPKHSLLYEYFTVYNELTKVKYVTEGMRKPAFLSGEQKKAIVDLLFKTNRKVTVKQLKEDYFKKIECFDSVEISGVEDRFNASLGTYHDLLKIIKDKDFLDNEENEDILEDIVLTLTLFEDREMIEERLKTYAHLFDDKVMKQLKRRRYTGWGRLSRKLINGIRDKQSGKTILDFLKSDGFANRNFMQLIHDDSLTFKEDIQKAQVSGQGDSLHEHIANLAGSPAIKKGILQTVKVVDELVKVMGRHKPENIVIEMARENQTTQKGQKNSRERMKRIEEGIKELGSQILKEHPVENTQLQNEKLYLYYLQNGRDMYVDQELDINRLSDYDVDHIVPQSFLKDDSIDNKVLTRSDKARGKSDNVPSEEVVKKMKNYWRQLLNAKLITQRKFDNLTKAERGGLSELDKAGFIKRQLVETRQITKHVAQILDSRMNTKYDENDKLIREVKVITLKSKLVSDFRKDFQFYKVREINNYHHAHDAYLNAVVGTALIKKYPKLESEFVYGDYKVYDVRKMIAKSEQEIGKATAKYFFYSNIMNFFKTEITLANGEIRKRPLIETNGETGEIVWDKGRDFATVRKVLSMPQVNIVKKTEVQTGGFSKESILPKRNSDKLIARKKDWDPKKYGGFDSPTVAYSVLVVAKVEKGKSKKLKSVKELLGITIMERSSFEKNPIDFLEAKGYKEVKKDLIIKLPKYSLFELENGRKRMLASAGELQKGNELALPSKYVNFLYLASHYEKLKGSPEDNEQKQLFVEQHKHYLDEIIEQISEFSKRVILADANLDKVLSAYNKHRDKPIREQAENIIHLFTLTNLGAPAAFKYFDTTIDRKRYTSTKEVLDATLIHQSITGLYETRIDLSQLGGDGGGSSGGGPAPGGMNPLQLLQPLPAEIKGTKLLAHWNSGATITCIPESFLEDEQPIKKTLIKTIHGEKQQNVYYVTFKVKGRKVEAEVIASPYEYILLSPTDVPWLTQQPLQLTILVPLQEYQEKILSKTALPEDQKQQLKTLFVKYDNLWQHWENQVGHRKIRPHNIATGDYPPRPQKQYPINPKAKPSIQIVIDDLLKQGVLTPQNSTMNTPVYPVPKPDGRWRMVLDYREVNKTIPLTAAQNQHSAGILATIVRQKYKTTLDLANGFWAHPITPESYWLTAFTWQGKQYCWTRLPQGFLNSPALFNADVVDLLKEIPNVQVYVDDIYLSHDDPKEHVQQLEKVFQILLQAGYVVSLKKSEIGQKTVEFLGFNITKEGRGLTDTFKTKLLNITPPKDLKQLQSILGLLNFARNFIPNFAELVQPLYNLIAPAKGKYIEWSEENTKQLNMVIEALNTASNLEERLPEQRLVIKVNTSPSAGYVRYYNETGKKPIMYLNYVFSKAELKFSMLEKLLTTMHKALIKAMDLAMGQEILVYSPIVSMTKIQKTPLPERKALPIRWITWMTYLEDPRIQFHYDKTLPELKHIPDVYTSSQSPVKHPSQYEGVFYTDGSAIKSPDPTKSNNAGMGIVHATYKPEYQVLNQWSIPLGNHTAQMAEIAAVEFACKKALKIPGPVLVITDSFYVAESANKELPYWKSNGFVNNKKKPLKHISKWKSIAECLSMKPDITIQHEKGISLQIPVFILKGNALADKLATQGSYVVNAGKRTADGSEFEKRTADGSEFESPKKKAKVE

SEQ ID NO: 7386 - protein, 2125 aa, synthetic construct
MPAAKRVKLDGGDKKYSIGLDIGTNSVGWAVITDEYKVPSKKFKVLGNTDRHSIKKNLIGALLFDSGETAEATRLKRTARRRYTRRKNRICYLQEIFSNEMAKVDDSFFHRLEESFLVEEDKKHERHPIFGNIVDEVAYHEKYPTIYHLRKKLVDSTDKADLRLIYLALAHMIKFRGHFLIEGDLNPDNSDVDKLFIQLVQTYNQLFEENPINASGVDAKAILSARLSKSRRLENLIAQLPGEKKNGLFGNLIALSLGLTPNFKSNFDLAEDAKLQLSKDTYDDDLDNLLAQIGDQYADLFLAAKNLSDAILLSDILRVNTEITKAPLSASMIKRYDEHHQDLTLLKALVRQQLPEKYKEIFFDQSKNGYAGYIDGGASQEEFYKFIKPILEKMDGTEELLVKLNREDLLRKQRTFDNGSIPHQIHLGELHAILRRQEDFYPFLKDNREKIEKILTFRIPYYVGPLARGNSRFAWMTRKSEETITPWNFEEVVDKGASAQSFIERMTNFDKNLPNEKVLPKHSLLYEYFTVYNELTKVKYVTEGMRKPAFLSGEQKKAIVDLLFKTNRKVTVKQLKEDYFKKIECFDSVEISGVEDRFNASLGTYHDLLKIIKDKDFLDNEENEDILEDIVLTLTLFEDREMIEERLKTYAHLFDDKVMKQLKRRRYTGWGRLSRKLINGIRDKQSGKTILDFLKSDGFANRNFMQLIHDDSLTFKEDIQKAQVSGQGDSLHEHIANLAGSPAIKKGILQTVKVVDELVKVMGRHKPENIVIEMARENQTTQKGQKNSRERMKRIEEGIKELGSQILKEHPVENTQLQNEKLYLYYLQNGRDMYVDQELDINRLSDYDVDHIVPQSFLKDDSIDNKVLTRSDKARGKSDNVPSEEVVKKMKNYWRQLLNAKLITQRKFDNLTKAERGGLSELDKAGFIKRQLVETRQITKHVAQILDSRMNTKYDENDKLIREVKVITLKSKLVSDFRKDFQFYKVREINNYHHAHDAYLNAVVGTALIKKYPKLESEFVYGDYKVYDVRKMIAKSEQEIGKATAKYFFYSNIMNFFKTEITLANGEIRKRPLIETNGETGEIVWDKGRDFATVRKVLSMPQVNIVKKTEVQTGGFSKESILPKRNSDKLIARKKDWDPKKYGGFDSPTVAYSVLVVAKVEKGKSKKLKSVKELLGITIMERSSFEKNPIDFLEAKGYKEVKKDLIIKLPKYSLFELENGRKRMLASAGELQKGNELALPSKYVNFLYLASHYEKLKGSPEDNEQKQLFVEQHKHYLDEIIEQISEFSKRVILADANLDKVLSAYNKHRDKPIREQAENIIHLFTLTNLGAPAAFKYFDTTIDRKRYTSTKEVLDATLIHQSITGLYETRIDLSQLGGDGGGSSGGGPAPGGLLGRDLLTKLKAQIQFSTEGPQVTWEDRPAMCLVLNLEEEYRLHEKPVPPSIDPSWLQLFPMVWAEKAGMGLANQVPPVVVELKSDASPVAVRQYPMSKEAREGIRPHIQRFLDLGILVPCQSPWNTPLLPVKKPGTNDYRPVQDLREVNKRVQDIHPTVPNPYNLLSSLPPSHTWYSVLDLKDAFFCLKLHPNSQPLFAFEWRDPEKGNTGQLTWTRLPQGFKNSPTLFNEALHRDLASFRALNPQVVMLQYVDDLLVAAPTYRDCKEGTRRLLQELSKLGYRVSAKKAQLCREEVTYLGYLLKGGKRWLTPARKATVMKIPTPTTPRQVREFLGTAGFCRLWIPGFASLAAPLYPLTRPKVPFTWTEAHQEAFGRIKEALLSAPALALPDLTKPFALYVDEKEGVARGVLTQTLGPWRRPVAYLSKKLDPVASGWPTCLKAIAAVALLLKDADKLTLGQNVLVIAPHNLESIVRQPPDRWMTNARMTHYQSLLLNERVSFAPPAILNPATLLPVESDDTPIHICSEILAEETGTRPDLRDQPLPGVPAWYTDGSSFIMDGRRQAGAAIVDNKRTVWASNLPEGTSAQKAELIALTQALRLAEGKSINIYTDSRYAFATAHVHGAIYKQRGWLTSAGKDIKNKEEILALLEAIHLPKRVAIIHCPGHQRGTDPVATGNRKADEAAKQAAQSTRILTETTKNAGKRTADGSEFEKRTADGSEFESPKKKAKVE

SEQ ID NO: 7387 - protein, 2216 aa, synthetic construct
MPAAKRVKLDGGDKKYSIGLDIGTNSVGWAVITDEYKVPSKKFKVLGNTDRHSIKKNLIGALLFDSGETAEATRLKRTARRRYTRRKNRICYLQEIFSNEMAKVDDSFFHRLEESFLVEEDKKHERHPIFGNIVDEVAYHEKYPTIYHLRKKLVDSTDKADLRLIYLALAHMIKFRGHFLIEGDLNPDNSDVDKLFIQLVQTYNQLFEENPINASGVDAKAILSARLSKSRRLENLIAQLPGEKKNGLFGNLIALSLGLTPNFKSNFDLAEDAKLQLSKDTYDDDLDNLLAQIGDQYADLFLAAKNLSDAILLSDILRVNTEITKAPLSASMIKRYDEHHQDLTLLKALVRQQLPEKYKEIFFDQSKNGYAGYIDGGASQEEFYKFIKPILEKMDGTEELLVKLNREDLLRKQRTFDNGSIPHQIHLGELHAILRRQEDFYPFLKDNREKIEKILTFRIPYYVGPLARGNSRFAWMTRKSEETITPWNFEEVVDKGASAQSFIERMTNFDKNLPNEKVLPKHSLLYEYFTVYNELTKVKYVTEGMRKPAFLSGEQKKAIVDLLFKTNRKVTVKQLKEDYFKKIECFDSVEISGVEDRFNASLGTYHDLLKIIKDKDFLDNEENEDILEDIVLTLTLFEDREMIEERLKTYAHLFDDKVMKQLKRRRYTGWGRLSRKLINGIRDKQSGKTILDFLKSDGFANRNFMQLIHDDSLTFKEDIQKAQVSGQGDSLHEHIANLAGSPAIKKGILQTVKVVDELVKVMGRHKPENIVIEMARENQTTQKGQKNSRERMKRIEEGIKELGSQILKEHPVENTQLQNEKLYLYYLQNGRDMYVDQELDINRLSDYDVDHIVPQSFLKDDSIDNKVLTRSDKARGKSDNVPSEEVVKKMKNYWRQLLNAKLITQRKFDNLTKAERGGLSELDKAGFIKRQLVETRQITKHVAQILDSRMNTKYDENDKLIREVKVITLKSKLVSDFRKDFQFYKVREINNYHHAHDAYLNAVVGTALIKKYPKLESEFVYGDYKVYDVRKMIAKSEQEIGKATAKYFFYSNIMNFFKTEITLANGEIRKRPLIETNGETGEIVWDKGRDFATVRKVLSMPQVNIVKKTEVQTGGFSKESILPKRNSDKLIARKKDWDPKKYGGFDSPTVAYSVLVVAKVEKGKSKKLKSVKELLGITIMERSSFEKNPIDFLEAKGYKEVKKDLIIKLPKYSLFELENGRKRMLASAGELQKGNELALPSKYVNFLYLASHYEKLKGSPEDNEQKQLFVEQHKHYLDEIIEQISEFSKRVILADANLDKVLSAYNKHRDKPIREQAENIIHLFTLTNLGAPAAFKYFDTTIDRKRYTSTKEVLDATLIHQSITGLYETRIDLSQLGGDGGGSSGGGPAPGGTLGDQGSRGSDPLPEPRVTLTVEGIPTEFLVNTGAEHSVLTKPMGKMGSKRTVVAGATGSKVYPWTTKRLLKIGQKQVTHSFLVIPECPAPLLGRDLLTKLKAQIQFSTEGPQVTWEDRPAMCLVLNLEEEYRLHEKPVPPSIDPSWLQLFPMVWAEKAGMGLANQVPPVVVELKSDASPVAVRQYPMSKEAREGIRPHIQRFLDLGILVPCQSPWNTPLLPVKKPGTNDYRPVQDLREVNKRVQDIHPTVPNPYNLLSSLPPSHTWYSVLDLKDAFFCLKLHPNSQPLFAFEWRDPEKGNTGQLTWTRLPQGFKNSPTLFNEALHRDLASFRALNPQVVMLQYVDDLLVAAPTYRDCKEGTRRLLQELSKLGYRVSAKKAQLCREEVTYLGYLLKGGKRWLTPARKATVMKIPTPTTPRQVREFLGTAGFCRLWIPGFASLAAPLYPLTRPKVPFTWTEAHQEAFGRIKEALLSAPALALPDLTKPFALYVDEKEGVARGVLTQTLGPWRRPVAYLSKKLDPVASGWPTCLKAIAAVALLLKDADKLTLGQNVLVIAPHNLESIVRQPPDRWMTNARMTHYQSLLLNERVSFAPPAILNPATLLPVESDDTPIHICSEILAEETGTRPDLRDQPLPGVPAWYTDGSSFIMDGRRQAGAAIVDNKRTVWASNLPEGTSAQKAELIALTQALRLAEGKSINIYTDSRYAFATAHVHGAIYKQRGWLTSAGKDIKNKEEILALLEAIHLPKRVAIIHCPGHQRGTDPVATGNRKADEAAKQAAQSTRILTETTKNAGKRTADGSEFEKRTADGSEFESPKKKAKVE

SEQ ID NO: 7388 - protein, 2216 aa, synthetic construct
MPAAKRVKLDGGDKKYSIGLDIGTNSVGWAVITDEYKVPSKKFKVLGNTDRHSIKKNLIGALLFDSGETAEATRLKRTARRRYTRRKNRICYLQEIFSNEMAKVDDSFFHRLEESFLVEEDKKHERHPIFGNIVDEVAYHEKYPTIYHLRKKLVDSTDKADLRLIYLALAHMIKFRGHFLIEGDLNPDNSDVDKLFIQLVQTYNQLFEENPINASGVDAKAILSARLSKSRRLENLIAQLPGEKKNGLFGNLIALSLGLTPNFKSNFDLAEDAKLQLSKDTYDDDLDNLLAQIGDQYADLFLAAKNLSDAILLSDILRVNTEITKAPLSASMIKRYDEHHQDLTLLKALVRQQLPEKYKEIFFDQSKNGYAGYIDGGASQEEFYKFIKPILEKMDGTEELLVKLNREDLLRKQRTFDNGSIPHQIHLGELHAILRRQEDFYPFLKDNREKIEKILTFRIPYYVGPLARGNSRFAWMTRKSEETITPWNFEEVVDKGASAQSFIERMTNFDKNLPNEKVLPKHSLLYEYFTVYNELTKVKYVTEGMRKPAFLSGEQKKAIVDLLFKTNRKVTVKQLKEDYFKKIECFDSVEISGVEDRFNASLGTYHDLLKIIKDKDFLDNEENEDILEDIVLTLTLFEDREMIEERLKTYAHLFDDKVMKQLKRRRYTGWGRLSRKLINGIRDKQSGKTILDFLKSDGFANRNFMQLIHDDSLTFKEDIQKAQVSGQGDSLHEHIANLAGSPAIKKGILQTVKVVDELVKVMGRHKPENIVIEMARENQTTQKGQKNSRERMKRIEEGIKELGSQILKEHPVENTQLQNEKLYLYYLQNGRDMYVDQELDINRLSDYDVDHIVPQSFLKDDSIDNKVLTRSDKARGKSDNVPSEEVVKKMKNYWRQLLNAKLITQRKFDNLTKAERGGLSELDKAGFIKRQLVETRQITKHVAQILDSRMNTKYDENDKLIREVKVITLKSKLVSDFRKDFQFYKVREINNYHHAHDAYLNAVVGTALIKKYPKLESEFVYGDYKVYDVRKMIAKSEQEIGKATAKYFFYSNIMNFFKTEITLANGEIRKRPLIETNGETGEIVWDKGRDFATVRKVLSMPQVNIVKKTEVQTGGFSKESILPKRNSDKLIARKKDWDPKKYGGFDSPTVAYSVLVVAKVEKGKSKKLKSVKELLGITIMERSSFEKNPIDFLEAKGYKEVKKDLIIKLPKYSLFELENGRKRMLASAGELQKGNELALPSKYVNFLYLASHYEKLKGSPEDNEQKQLFVEQHKHYLDEIIEQISEFSKRVILADANLDKVLSAYNKHRDKPIREQAENIIHLFTLTNLGAPAAFKYFDTTIDRKRYTSTKEVLDATLIHQSITGLYETRIDLSQLGGDGGGSSGGGPAPGGTLGDQGSRGSDPLPEPRVTLTVEGIPTEFLVNTGAEHSVLTKPMGKMGSKRTVVAGATGSKVYPWTTKRLLKIGQKQVTHSFLVIPECPAPLLGRDLLTKLKAQIQFSTEGPQVTWEDRPAMCLVLNLEEEYRLHEKPVPPSIDPSWLQLFPMVWAEKAGMGLANQVPPVVVELKSDASPVAVRQYPMSKEAREGIRPHIQRFLDLGILVPCQSPWNTPLLPVKKPGTNDYRPVQDLREVNKRVQDIHPTVPNPYNLLSSLPPSHTWYSVLDLKDAFFCLKLHPNSQPLFAFEWRDPEKGNTGQLTWTRLPQGFKNSPTLFNEALHRDLASFRALNPQVVMLQYVDDLLVAAPTYRDCKEGTRRLLQELSKLGYRVSAKKAQLCREEVTYLGYLLKGGKRWLTPARKATVMKIPTPTTPRQVREFLGKAGFCRLFIPGFASLAAPLYPLTRPKVPFTWTEAHQEAFGRIKEALLSAPALALPDLTKPFALYVDEKEGVARGVLTQTLGPWRRPVAYLSKKLDPVASGWPTCLKAIAAVALLLKDADKLTLGQNVLVIAPHNLESIVRQPPDRWMTNARMTHYQSLLLNERVSFAPPAILNPATLLPVESDDTPIHICSEILAEETGTRPDLRDQPLPGVPAWYTDGSSFIMDGRRQAGAAIVDNKRTVWASNLPEGTSAQKAELIALTQALRLAEGKSINIYTDSRYAFATAHVHGAIYKQRGWLTSAGKDIKNKEEILALLEAIHLPKRVAIIHCPGHQRGTDPVATGNRKADEAAKQAAQSTRILTETTKNAGKRTADGSEFEKRTADGSEFESPKKKAKVE

SEQ ID NO: 7389 - protein, 2094 aa, synthetic construct
MPAAKRVKLDGGDKKYSIGLDIGTNSVGWAVITDEYKVPSKKFKVLGNTDRHSIKKNLIGALLFDSGETAEATRLKRTARRRYTRRKNRICYLQEIFSNEMAKVDDSFFHRLEESFLVEEDKKHERHPIFGNIVDEVAYHEKYPTIYHLRKKLVDSTDKADLRLIYLALAHMIKFRGHFLIEGDLNPDNSDVDKLFIQLVQTYNQLFEENPINASGVDAKAILSARLSKSRRLENLIAQLPGEKKNGLFGNLIALSLGLTPNFKSNFDLAEDAKLQLSKDTYDDDLDNLLAQIGDQYADLFLAAKNLSDAILLSDILRVNTEITKAPLSASMIKRYDEHHQDLTLLKALVRQQLPEKYKEIFFDQSKNGYAGYIDGGASQEEFYKFIKPILEKMDGTEELLVKLNREDLLRKQRTFDNGSIPHQIHLGELHAILRRQEDFYPFLKDNREKIEKILTFRIPYYVGPLARGNSRFAWMTRKSEETITPWNFEEVVDKGASAQSFIERMTNFDKNLPNEKVLPKHSLLYEYFTVYNELTKVKYVTEGMRKPAFLSGEQKKAIVDLLFKTNRKVTVKQLKEDYFKKIECFDSVEISGVEDRFNASLGTYHDLLKIIKDKDFLDNEENEDILEDIVLTLTLFEDREMIEERLKTYAHLFDDKVMKQLKRRRYTGWGRLSRKLINGIRDKQSGKTILDFLKSDGFANRNFMQLIHDDSLTFKEDIQKAQVSGQGDSLHEHIANLAGSPAIKKGILQTVKVVDELVKVMGRHKPENIVIEMARENQTTQKGQKNSRERMKRIEEGIKELGSQILKEHPVENTQLQNEKLYLYYLQNGRDMYVDQELDINRLSDYDVDHIVPQSFLKDDSIDNKVLTRSDKARGKSDNVPSEEVVKKMKNYWRQLLNAKLITQRKFDNLTKAERGGLSELDKAGFIKRQLVETRQITKHVAQILDSRMNTKYDENDKLIREVKVITLKSKLVSDFRKDFQFYKVREINNYHHAHDAYLNAVVGTALIKKYPKLESEFVYGDYKVYDVRKMIAKSEQEIGKATAKYFFYSNIMNFFKTEITLANGEIRKRPLIETNGETGEIVWDKGRDFATVRKVLSMPQVNIVKKTEVQTGGFSKESILPKRNSDKLIARKKDWDPKKYGGFDSPTVAYSVLVVAKVEKGKSKKLKSVKELLGITIMERSSFEKNPIDFLEAKGYKEVKKDLIIKLPKYSLFELENGRKRMLASAGELQKGNELALPSKYVNFLYLASHYEKLKGSPEDNEQKQLFVEQHKHYLDEIIEQISEFSKRVILADANLDKVLSAYNKHRDKPIREQAENIIHLFTLTNLGAPAAFKYFDTTIDRKRYTSTKEVLDATLIHQSITGLYETRIDLSQLGGDGGGSSGGGPAPGGTLNLEDEYRLYETSAEPEVSPGSTWLSDFPQAWAETGGMGLAVRQAPLIIPLKATSTPVSIKQYPMSQEAKLGIKPHIQRLLDQGILVPCQSPWNTPLLPVKKPGTNDYRPVQDLREVNKRVEDIHPTVPNPYNLLSGLPPSHRWYTVLDLKDAFFCLRLHPTSQPLFAFEWRDPGMGISGQLTWTRLPQGFKNSPTLFNEALHRDLADFRIQHPDLILLQYVDDILLAATSELDCQQGTRALLLTLGNLGYRASAKKAQLCQKQVKYLGYLLKEGQRWLTEARKETVMGQPTPKTPRQLREFLGKAGFCRLFIPGFAEMAAPLYPLTKPGTLFNWGPDQQKAYQEIKQALLTAPALGLPDLTKPFELFVDEKQGYAKGVLTQKLGPWRRPVAYLSKKLDPVAAGWPPCLRMVAAIAVLRKDAGKLTMGQPLVILAPHAVEALVKQPPDRWLSNARMTHYQAMLLDTDRVQFGPVVALNPATLLPLPEEGAPHDCLEILAETHGTRPDLTDQPIPDADHTWYTDGSSFLQEGQRKAGAAVTTETEVIWARALPAGTSAQRAELIALTQALKMAEGKRLNVYTDSRYAFATAHIHGEIYRRRGWLTSEGREIKNKSEILALLKALFLPKRLSIIHCLGHQKGDSAEARGNRLADQAAREAAIKTPPDTSTLLAGKRTADGSEFEKRTADGSEFESPKKKAKVE

SEQ ID NO: 7390 - protein, 2094 aa, synthetic construct
MPAAKRVKLDGGDKKYSIGLDIGTNSVGWAVITDEYKVPSKKFKVLGNTDRHSIKKNLIGALLFDSGETAEATRLKRTARRRYTRRKNRICYLQEIFSNEMAKVDDSFFHRLEESFLVEEDKKHERHPIFGNIVDEVAYHEKYPTIYHLRKKLVDSTDKADLRLIYLALAHMIKFRGHFLIEGDLNPDNSDVDKLFIQLVQTYNQLFEENPINASGVDAKAILSARLSKSRRLENLIAQLPGEKKNGLFGNLIALSLGLTPNFKSNFDLAEDAKLQLSKDTYDDDLDNLLAQIGDQYADLFLAAKNLSDAILLSDILRVNTEITKAPLSASMIKRYDEHHQDLTLLKALVRQQLPEKYKEIFFDQSKNGYAGYIDGGASQEEFYKFIKPILEKMDGTEELLVKLNREDLLRKQRTFDNGSIPHQIHLGELHAILRRQEDFYPFLKDNREKIEKILTFRIPYYVGPLARGNSRFAWMTRKSEETITPWNFEEVVDKGASAQSFIERMTNFDKNLPNEKVLPKHSLLYEYFTVYNELTKVKYVTEGMRKPAFLSGEQKKAIVDLLFKTNRKVTVKQLKEDYFKKIECFDSVEISGVEDRFNASLGTYHDLLKIIKDKDFLDNEENEDILEDIVLTLTLFEDREMIEERLKTYAHLFDDKVMKQLKRRRYTGWGRLSRKLINGIRDKQSGKTILDFLKSDGFANRNFMQLIHDDSLTFKEDIQKAQVSGQGDSLHEHIANLAGSPAIKKGILQTVKVVDELVKVMGRHKPENIVIEMARENQTTQKGQKNSRERMKRIEEGIKELGSQILKEHPVENTQLQNEKLYLYYLQNGRDMYVDQELDINRLSDYDVDHIVPQSFLKDDSIDNKVLTRSDKARGKSDNVPSEEVVKKMKNYWRQLLNAKLITQRKFDNLTKAERGGLSELDKAGFIKRQLVETRQITKHVAQILDSRMNTKYDENDKLIREVKVITLKSKLVSDFRKDFQFYKVREINNYHHAHDAYLNAVVGTALIKKYPKLESEFVYGDYKVYDVRKMIAKSEQEIGKATAKYFFYSNIMNFFKTEITLANGEIRKRPLIETNGETGEIVWDKGRDFATVRKVLSMPQVNIVKKTEVQTGGFSKESILPKRNSDKLIARKKDWDPKKYGGFDSPTVAYSVLVVAKVEKGKSKKLKSVKELLGITIMERSSFEKNPIDFLEAKGYKEVKKDLIIKLPKYSLFELENGRKRMLASAGELQKGNELALPSKYVNFLYLASHYEKLKGSPEDNEQKQLFVEQHKHYLDEIIEQISEFSKRVILADANLDKVLSAYNKHRDKPIREQAENIIHLFTLTNLGAPAAFKYFDTTIDRKRYTSTKEVLDATLIHQSITGLYETRIDLSQLGGDGGGSSGGGPAPGGLGIEDEYRLHETSTEPDVSLGSTWLSDFPQAWAETGGMGLAVRQAPLIIPLKATSTPVSIQQYPMSHEARLGIKPHIQRLLDQGILVPCQSPWNTPLLPVKKPGTNDYRPVQDLREVNKRVEDIHPTVPNPYNLLSGLPPSHQWYTVLDLKDAFFCLRLHPTSQPLFAFEWRDPGMGISGQLTWTRLPQGFKNSPTLFNEALHRDLADFRIQHPDLILLQYVDDILLAATSELDCQQGTRALLQTLGDLGYRASAKKAQICQKQVKYLGYLLREGQRWLTEARKETVMGQPVPKTPRQLREFLGKAGFCRLFIPGFAEMAAPLYPLTKPGTLFSWGPDQQKAYQEIKQALLTAPALGLPDLTKPFELFVDEKQGYAKGVLTQKLGPWRRPVAYLSKKLDPVAAGWPPCLRMVAAIAVLTKDAGKLTMGQPLVILAPHAVEALVKQPPDRWLSNARMTHYQAMLLDTDRVQFGPVVALNPATLLPLPEEGAPHDCLEILAETHGTRPDLTDQPIPDADHTWYTDGSSFLQEGQRKAGAAVTTETEVIWAGALPAGTSAQRAELIALTQALKMAEGKRLNVYTDSRYAFATAHIHGEIYRRRGWLTSEGREIKNKSEILALLKALFLPKRLSIIHCLGHQKGDSAEARGNRLADQAAREAAIKTPPDTSTLLIAGKRTADGSEFEKRTADGSEFESPKKKAKVE

SEQ ID NO: 7391 - protein, 2094 aa, synthetic construct; identical to SEQ ID NO: 7390

SEQ ID NO: 7392 - protein, 2094 aa, synthetic construct
MPAAKRVKLDGGDKKYSIGLDIGTNSVGWAVITDEYKVPSKKFKVLGNTDRHSIKKNLIGALLFDSGETAEATRLKRTARRRYTRRKNRICYLQEIFSNEMAKVDDSFFHRLEESFLVEEDKKHERHPIFGNIVDEVAYHEKYPTIYHLRKKLVDSTDKADLRLIYLALAHMIKFRGHFLIEGDLNPDNSDVDKLFIQLVQTYNQLFEENPINASGVDAKAILSARLSKSRRLENLIAQLPGEKKNGLFGNLIALSLGLTPNFKSNFDLAEDAKLQLSKDTYDDDLDNLLAQIGDQYADLFLAAKNLSDAILLSDILRVNTEITKAPLSASMIKRYDEHHQDLTLLKALVRQQLPEKYKEIFFDQSKNGYAGYIDGGASQEEFYKFIKPILEKMDGTEELLVKLNREDLLRKQRTFDNGSIPHQIHLGELHAILRRQEDFYPFLKDNREKIEKILTFRIPYYVGPLARGNSRFAWMTRKSEETITPWNFEEVVDKGASAQSFIERMTNFDKNLPNEKVLPKHSLLYEYFTVYNELTKVKYVTEGMRKPAFLSGEQKKAIVDLLFKTNRKVTVKQLKEDYFKKIECFDSVEISGVEDRFNASLGTYHDLLKIIKDKDFLDNEENEDILEDIVLTLTLFEDREMIEERLKTYAHLFDDKVMKQLKRRRYTGWGRLSRKLINGIRDKQSGKTILDFLKSDGFANRNFMQLIHDDSLTFKEDIQKAQVSGQGDSLHEHIANLAGSPAIKKGILQTVKVVDELVKVMGRHKPENIVIEMARENQTTQKGQKNSRERMKRIEEGIKELGSQILKEHPVENTQLQNEKLYLYYLQNGRDMYVDQELDINRLSDYDVDHIVPQSFLKDDSIDNKVLTRSDKARGKSDNVPSEEVVKKMKNYWRQLLNAKLITQRKFDNLTKAERGGLSELDKAGFIKRQLVETRQITKHVAQILDSRMNTKYDENDKLIREVKVITLKSKLVSDFRKDFQFYKVREINNYHHAHDAYLNAVVGTALIKKYPKLESEFVYGDYKVYDVRKMIAKSEQEIGKATAKYFFYSNIMNFFKTEITLANGEIRKRPLIETNGETGEIVWDKGRDFATVRKVLSMPQVNIVKKTEVQTGGFSKESILPKRNSDKLIARKKDWDPKKYGGFDSPTVAYSVLVVAKVEKGKSKKLKSVKELLGITIMERSSFEKNPIDFLEAKGYKEVKKDLIIKLPKYSLFELENGRKRMLASAGELQKGNELALPSKYVNFLYLASHYEKLKGSPEDNEQKQLFVEQHKHYLDEIIEQISEFSKRVILADANLDKVLSAYNKHRDKPIREQAENIIHLFTLTNLGAPAAFKYFDTTIDRKRYTSTKEVLDATLIHQSITGLYETRIDLSQLGGDGGGSSGGGPAPGGTLNIEDEYRLHETSKGPDVPLGSTWLSDFPQAWAETGGMGLAFRQAPLIISLKATSTPVSIKQYPMSQEARLGIKPHIQRLLDQGILVPCQSPWNTPLLPVKKPGTNDYRPVQDLREVNKRVEDIHPTVPNPYNLLSGLPPSHQWYTVLDLKDAFFCLRLHPTSQSLFAFEWKDPEMGISGQLTWTRLPQGFKNSPTLFNEALHRDLADFRIQHPDLILLQYVDDLLLAATSELDCQQGTRALLQTLGDLGYRASAKKAQICQKQVKYLGYLLKEGQRWLTEARKETVMGQPTPKTPRQLREFLGKAGLCRLFIPGFAEMAAPLYPLTKPGTLFKWGPDQQKAYQEIKQALLTAPALGLPDLTKPFELFVDEKQGYAKGVLTQKLGPWRRPVAYLSKKLDPVAAGWPPCLRMVAAIAVLTKDVGKLTMGQPLVILAPHAVEALVKQPPDRWLSNARMTHYQALLLDTDRVQFGPIVALNPATLLPLPEEGLQHDCLDILAEAHGTRPDLTDQPLPDADHTWYTDGSSFLQEGQRRAGAAVTTETEVIWAKALPAGTSAQRAELIALTQALKMAAGKKLNVYTDSRYAFATAHIHGEIYRRRGWLTSEGKEIKNKDEILALLKALFLPKRLSIIHCPGHQKGNHAEARGNRMADQAAREVATRETPETSTLLAGKRTADGSEFEKRTADGSEFESPKKKAKVE

SEQ ID NO: 7393 - protein, 2094 aa, synthetic construct
MPAAKRVKLDGGDKKYSIGLDIGTNSVGWAVITDEYKVPSKKFKVLGNTDRHSIKKNLIGALLFDSGETAEATRLKRTARRRYTRRKNRICYLQEIFSNEMAKVDDSFFHRLEESFLVEEDKKHERHPIFGNIVDEVAYHEKYPTIYHLRKKLVDSTDKADLRLIYLALAHMIKFRGHFLIEGDLNPDNSDVDKLFIQLVQTYNQLFEENPINASGVDAKAILSARLSKSRRLENLIAQLPGEKKNGLFGNLIALSLGLTPNFKSNFDLAEDAKLQLSKDTYDDDLDNLLAQIGDQYADLFLAAKNLSDAILLSDILRVNTEITKAPLSASMIKRYDEHHQDLTLLKALVRQQLPEKYKEIFFDQSKNGYAGYIDGGASQEEFYKFIKPILEKMDGTEELLVKLNREDLLRKQRTFDNGSIPHQIHLGELHAILRRQEDFYPFLKDNREKIEKILTFRIPYYVGPLARGNSRFAWMTRKSEETITPWNFEEVVDKGASAQSFIERMTNFDKNLPNEKVLPKHSLLYEYFTVYNELTKVKYVTEGMRKPAFLSGEQKKAIVDLLFKTNRKVTVKQLKEDYFKKIECFDSVEISGVEDRFNASLGTYHDLLKIIKDKDFLDNEENEDILEDIVLTLTLFEDREMIEERLKTYAHLFDDKVMKQLKRRRYTGWGRLSRKLINGIRDKQSGKTILDFLKSDGFANRNFMQLIHDDSLTFKEDIQKAQVSGQGDSLHEHIANLAGSPAIKKGILQTVKVVDELVKVMGRHKPENIVIEMARENQTTQKGQKNSRERMKRIEEGIKELGSQILKEHPVENTQLQNEKLYLYYLQNGRDMYVDQELDINRLSDYDVDHIVPQSFLKDDSIDNKVLTRSDKARGKSDNVPSEEVVKKMKNYWRQLLNAKLITQRKFDNLTKAERGGLSELDKAGFIKRQLVETRQITKHVAQILDSRMNTKYDENDKLIREVKVITLKSKLVSDFRKDFQFYKVREINNYHHAHDAYLNAVVGTALIKKYPKLESEFVYGDYKVYDVRKMIAKSEQEIGKATAKYFFYSNIMNFFKTEITLANGEIRKRPLIETNGETGEIVWDKGRDFATVRKVLSMPQVNIVKKTEVQTGGFSKESILPKRNSDKLIARKKDWDPKKYGGFDSPTVAYSVLVVAKVEKGKSKKLKSVKELLGITIMERSSFEKNPIDFLEAKGYKEVKKDLIIKLPKYSLFELENGRKRMLASAGELQKGNELALPSKYVNFLYLASHYEKLKGSPEDNEQKQLFVEQHKHYLDEIIEQISEFSKRVILADANLDKVLSAYNKHRDKPIREQAENIIHLFTLTNLGAPAAFKYFDTTIDRKRYTSTKEVLDATLIHQSITGLYETRIDLSQLGGDGGGSSGGGPAPGGTLNIEDEHRLHETSKEPDVSLGSTWLSDFPQAWAETGGMGLAVRQAPLIIPLKATSTPVSIKQYPMSQEARLGIKPHIQRLLDQGILVPCQSPWNTPLLPVKKPGTNDYRPVQDLREVNKRVEDIHPTVPNPYNLLSGLPPSHQWYTVLDLKDAFFCLRLHPTSQPLFAFEWRDPEMGISGQLTWTRLPQGFKNSPTLFNEALHRDLADFRIQHPDLILLQYVDDLLLAATSELDCQQGTRALLQTLGNLGYRASAKKAQICQKQVKYLGYLLKEGQRWLTEARKETVMGQPTPKTPRQLREFLGTAGFCRLWIPGFAEMAAPLYPLTKPGTLFNWGPDQQKAYQEIKQALLTAPALGLPDLTKPFELFVDEKQGYAKGVLTQKLGPWRRPVAYLSKKLDPVAAGWPPCLRMVAAIAVLTKDAGKLTMGQPLVILAPHAVEALVKQPPDRWLSNARMTHYQALLLDTDRVQFGPVVALNPATLLPLPEEGLQHNCLDILAEAHGTRPDLTDQPLPDADHTWYTDGSSLLQEGQRKAGAAVTTETEVIWAKALPAGTSAQRAELIALTQALKMAEGKKLNVYTDSRYAFATAHIHGEIYRRRGWLTSEGKEIKNKDEILALLKALFLPKRLSIIHCPGHQKGHSAEARGNRMADQAARKAAITETPDTSTLLAGKRTADGSEFEKRTADGSEFESPKKKAKVE

SEQ ID NO: 7394 - protein, 2094 aa, synthetic construct; identical to SEQ ID NO: 7393

SEQ ID NO: 7395 - protein, 2088 aa, synthetic construct; identical to SEQ ID NO: 4532

SEQ ID NO: 7396 - protein, 2088 aa, synthetic construct
MPAAKRVKLDGGDKKYSIGLDIGTNSVGWAVITDEYKVPSKKFKVLGNTDRHSIKKNLIGALLFDSGETAEATRLKRTARRRYTRRKNRICYLQEIFSNEMAKVDDSFFHRLEESFLVEEDKKHERHPIFGNIVDEVAYHEKYPTIYHLRKKLVDSTDKADLRLIYLALAHMIKFRGHFLIEGDLNPDNSDVDKLFIQLVQTYNQLFEENPINASGVDAKAILSARLSKSRRLENLIAQLPGEKKNGLFGNLIALSLGLTPNFKSNFDLAEDAKLQLSKDTYDDDLDNLLAQIGDQYADLFLAAKNLSDAILLSDILRVNTEITKAPLSASMIKRYDEHHQDLTLLKALVRQQLPEKYKEIFFDQSKNGYAGYIDGGASQEEFYKFIKPILEKMDGTEELLVKLNREDLLRKQRTFDNGSIPHQIHLGELHAILRRQEDFYPFLKDNREKIEKILTFRIPYYVGPLARGNSRFAWMTRKSEETITPWNFEEVVDKGASAQSFIERMTNFDKNLPNEKVLPKHSLLYEYFTVYNELTKVKYVTEGMRKPAFLSGEQKKAIVDLLFKTNRKVTVKQLKEDYFKKIECFDSVEISGVEDRFNASLGTYHDLLKIIKDKDFLDNEENEDILEDIVLTLTLFEDREMIEERLKTYAHLFDDKVMKQLKRRRYTGWGRLSRKLINGIRDKQSGKTILDFLKSDGFANRNFMQLIHDDSLTFKEDIQKAQVSGQGDSLHEHIANLAGSPAIKKGILQTVKVVDELVKVMGRHKPENIVIEMARENQTTQKGQKNSRERMKRIEEGIKELGSQILKEHPVENTQLQNEKLYLYYLQNGRDMYVDQELDINRLSDYDVDHIVPQSFLKDDSIDNKVLTRSDKARGKSDNVPSEEVVKKMKNYWRQLLNAKLITQRKFDNLTKAERGGLSELDKAGFIKRQLVETRQITKHVAQILDSRMNTKYDENDKLIREVKVITLKSKLVSDFRKDFQFYKVREINNYHHAHDAYLNAVVGTALIKKYPKLESEFVYGDYKVYDVRKMIAKSEQEIGKATAKYFFYSNIMNFFKTEITLANGEIRKRPLIETNGETGEIVWDKGRDFATVRKVLSMPQVNIVKKTEVQTGGFSKESILPKRNSDKLIARKKDWDPKKYGGFDSPTVAYSVLVVAKVEKGKSKKLKSVKELLGITIMERSSFEKNPIDFLEAKGYKEVKKDLIIKLPKYSLFELENGRKRMLASAGELQKGNELALPSKYVNFLYLASHYEKLKGSPEDNEQKQLFVEQHKHYLDEIIEQISEFSKRVILADANLDKVLSAYNKHRDKPIREQAENIIHLFTLTNLGAPAAFKYFDTTIDRKRYTSTKEVLDATLIHQSITGLYETRIDLSQLGGDGGGSSGGGPAPGGTLQLDDEYRLYSPLVKPDQNIQFWLEQFPQAWAETAGMGLAKQVPPQVIQLKASATPVSVRQYPLSKEAQEGIRPHVQRLIQQGILVPVQSPWNTPLLPVRKPGTNDYRPVQDLREVNKRVQDIHPTVPNPYNLLCALPPQRSWYTVLDLKDAFFCLRLHPTSQPLFAFEWRDPGTGRTGQLTWTRLPQGFKNSPTIFDEALHRDLANFRIQHPQVTLLQYVDDLLLAGATKQDCLEGTKALLLELSDLGYRASAKKAQICRREVTYLGYSLRDGQRWLTEARKKTVVQIPAPTTAKQVREFLGTAGFCRLWIPGFATLAAPLYPLTKEKGEFSWAPEHQKAFDAIKKALLSAPALALPDVTKPFTLYVDERKGVARGVLTQTLGPWRRPVAYLSKKLDPVASGWPVCLKAIAAVAILVKDADKLTLGQNITVIAPHALENIVRQPPDRWMTNARMTHYQSLLLTERVTFAPPAALNPATLLPEETDEPVTHDCHQLLIEETGVRKDLTDIPLTGEVLTWFTDGSSYVVEGKRMAGAAVVDGTRTIWASSLPEGTSAQKAELMALTQALRLAEGKSINIYTDSRYAFATAHVHGAIYKQRGLLTSAGREIKNKEEILSLLEALHLPKRLAIIHCPGHQKAKDPISRGNQMADRVAKQAAQGVNLLAGKRTADGSEFEKRTADGSEFESPKKKAKVE

SEQ ID NO: 7397 - protein, 2088 aa, synthetic construct; identical to SEQ ID NO: 4532

SEQ ID NO: 7398 - protein, 2085 aa, synthetic construct
MPAAKRVKLDGGDKKYSIGLDIGTNSVGWAVITDEYKVPSKKFKVLGNTDRHSIKKNLIGALLFDSGETAEATRLKRTARRRYTRRKNRICYLQEIFSNEMAKVDDSFFHRLEESFLVEEDKKHERHPIFGNIVDEVAYHEKYPTIYHLRKKLVDSTDKADLRLIYLALAHMIKFRGHFLIEGDLNPDNSDVDKLFIQLVQTYNQLFEENPINASGVDAKAILSARLSKSRRLENLIAQLPGEKKNGLFGNLIALSLGLTPNFKSNFDLAEDAKLQLSKDTYDDDLDNLLAQIGDQYADLFLAAKNLSDAILLSDILRVNTEITKAPLSASMIKRYDEHHQDLTLLKALVRQQLPEKYKEIFFDQSKNGYAGYIDGGASQEEFYKFIKPILEKMDGTEELLVKLNREDLLRKQRTFDNGSIPHQIHLGELHAILRRQEDFYPFLKDNREKIEKILTFRIPYYVGPLARGNSRFAWMTRKSEETITPWNFEEVVDKGASAQSFIERMTNFDKNLPNEKVLPKHSLLYEYFTVYNELTKVKYVTEGMRKPAFLSGEQKKAIVDLLFKTNRKVTVKQLKEDYFKKIECFDSVEISGVEDRFNASLGTYHDLLKIIKDKDFLDNEENEDILEDIVLTLTLFEDREMIEERLKTYAHLFDDKVMKQLKRRRYTGWGRLSRKLINGIRDKQSGKTILDFLKSDGFANRNFMQLIHDDSLTFKEDIQKAQVSGQGDSLHEHIANLAGSPAIKKGILQTVKVVDELVKVMGRHKPENIVIEMARENQTTQKGQKNSRERMKRIEEGIKELGSQILKEHPVENTQLQNEKLYLYYLQNGRDMYVDQELDINRLSDYDVDHIVPQSFLKDDSIDNKVLTRSDKARGKSDNVPSEEVVKKMKNYWRQLLNAKLITQRKFDNLTKAERGGLSELDKAGFIKRQLVETRQITKHVAQILDSRMNTKYDENDKLIREVKVITLKSKLVSDFRKDFQFYKVREINNYHHAHDAYLNAVVGTALIKKYPKLESEFVYGDYKVYDVRKMIAKSEQEIGKATAKYFFYSNIMNFFKTEITLANGEIRKRPLIETNGETGEIVWDKGRDFATVRKVLSMPQVNIVKKTEVQTGGFSKESILPKRNSDKLIARKKDWDPKKYGGFDSPTVAYSVLVVAKVEKGKSKKLKSVKELLGITIMERSSFEKNPIDFLEAKGYKEVKKDLIIKLPKYSLFELENGRKRMLASAGELQKGNELALPSKYVNFLYLASHYEKLKGSPEDNEQKQLFVEQHKHYLDEIIEQISEFSKRVILADANLDKVLSAYNKHRDKPIREQAENIIHLFTLTNLGAPAAFKYFDTTIDRKRYTSTKEVLDATLIHQSITGLYETRIDLSQLGGDGGGSSGGGPAPGGIPWLMKKPLQLTTLVPLQEYEERLLKQTMLTGSYKEKLQSLFLKYDALWQHWENQVGHRRIKPHHIATGTVNPRPQKQYPINPKAKASIQTVINDLLKQGVLIQQNSIMNTPVYPVPKPDGKWRMVLDYREVNKTIPLIAAQNQHSAGILSSIFRGKYKTTLDLSNGFWAHSITPESYWLTAFTWLGQQYCWTRLPQGFLNSPALFNADVVDLLKEVPNVQVYVDDIYISHDDPREHLEQLEKVFSLLLNAGYVVSLKKSEIAQHEVEFLGFNITKEGRGLTETFKQKLLNITPPRDLKQLQSILGKLNFARNFIPNFSELVKPLYNIIATAPGKYITWTTDNSQQLQNIISMLNSAENLEERNPEVRLIMKVNTSPSAGYIRFYNEFAKRPIMYLNYVYTKAEVKFTNTEKLLTTIHKGLIKALDLGMGQEILVYSPIVSMTKIQKTPLPERKALPIRWITWMSYLEDPRIQFHYDKTLPELQQVPTVTDDIIAKIKHPSEFSMVFYTDGSAIKHPNVNKSHNAGMGIAQVQFKPEFTVINTWSIPLGDHTAQLAEVAAVEFACKKALKIDGPVLIVTDSFYVAESVNKELPYWQSNGFFNNKKKPLKHVSKWKSIADCIQLKPDIIIIHEKGHQPTASTFHTEGNNLADKLATQGSYVVNAGKRTADGSEFEKRTADGSEFESPKKKAKVE

SEQ ID NO: 7399 - protein, 2174 aa, synthetic construct
MPAAKRVKLDGGDKKYSIGLDIGTNSVGWAVITDEYKVPSKKFKVLGNTDRHSIKKNLIGALLFDSGETAEATRLKRTARRRYTRRKNRICYLQEIFSNEMAKVDDSFFHRLEESFLVEEDKKHERHPIFGNIVDEVAYHEKYPTIYHLRKKLVDSTDKADLRLIYLALAHMIKFRGHFLIEGDLNPDNSDVDKLFIQLVQTYNQLFEENPINASGVDAKAILSARLSKSRRLENLIAQLPGEKKNGLFGNLIALSLGLTPNFKSNFDLAEDAKLQLSKDTYDDDLDNLLAQIGDQYADLFLAAKNLSDAILLSDILRVNTEITKAPLSASMIKRYDEHHQDLTLLKALVRQQLPEKYKEIFFDQSKNGYAGYIDGGASQEEFYKFIKPILEKMDGTEELLVKLNREDLLRKQRTFDNGSIPHQIHLGELHAILRRQEDFYPFLKDNREKIEKILTFRIPYYVGPLARGNSRFAWMTRKSEETITPWNFEEVVDKGASAQSFIERMTNFDKNLPNEKVLPKHSLLYEYFTVYNELTKVKYVTEGMRKPAFLSGEQKKAIVDLLFKTNRKVTVKQLKEDYFKKIECFDSVEISGVEDRFNASLGTYHDLLKIIKDKDFLDNEENEDILEDIVLTLTLFEDREMIEERLKTYAHLFDDKVMKQLKRRRYTGWGRLSRKLINGIRDKQSGKTILDFLKSDGFANRNFMQLIHDDSLTFKEDIQKAQVSGQGDSLHEHIANLAGSPAIKKGILQTVKVVDELVKVMGRHKPENIVIEMARENQTTQKGQKNSRERMKRIEEGIKELGSQILKEHPVENTQLQNEKLYLYYLQNGRDMYVDQELDINRLSDYDVDHIVPQSFLKDDSIDNKVLTRSDKARGKSDNVPSEEVVKKMKNYWRQLLNAKLITQRKFDNLTKAERGGLSELDKAGFIKRQLVETRQITKHVAQILDSRMNTKYDENDKLIREVKVITLKSKLVSDFRKDFQFYKVREINNYHHAHDAYLNAVVGTALIKKYPKLESEFVYGDYKVYDVRKMIAKSEQEIGKATAKYFFYSNIMNFFKTEITLANGEIRKRPLIETNGETGEIVWDKGRDFATVRKVLSMPQVNIVKKTEVQTGGFSKESILPKRNSDKLIARKKDWDPKKYGGFDSPTVAYSVLVVAKVEKGKSKKLKSVKELLGITIMERSSFEKNPIDFLEAKGYKEVKKDLIIKLPKYSLFELENGRKRMLASAGELQKGNELALPSKYVNFLYLASHYEKLKGSPEDNEQKQLFVEQHKHYLDEIIEQISEFSKRVILADANLDKVLSAYNKHRDKPIREQAENIIHLFTLTNLGAPAAFKYFDTTIDRKRYTSTKEVLDATLIHQSITGLYETRIDLSQLGGDGGGSSGGGPAPGGMDPLQLLQPLEAEIKGTKLKAHWNSGATITCVPQAFLEEEVPIKNIWIKTIHGEKEQPVYYLTFKIQGRKVEAEVISSPYDYILVSPSDIPWLMKKPLQLTTLVPLQEYEERLLKQTMLTGSYKEKLQSLFLKYDALWQHWENQVGHRRIKPHHIATGTVNPRPQKQYPINPKAKASIQTVINDLLKQGVLIQQNSIMNTPVYPVPKPDGKWRMVLDYREVNKTIPLIAAQNQHSAGILSSIFRGKYKTTLDLSNGFWAHSITPESYWLTAFTWLGQQYCWTRLPQGFLNSPALFNADVVDLLKEVPNVQVYVDDIYISHDDPREHLEQLEKVFSLLLNAGYVVSLKKSEIAQHEVEFLGFNITKEGRGLTETFKQKLLNITPPRDLKQLQSILGLLNFARNFIPNFSELVKPLYNIIATAPGKYITWTTDNSQQLQNIISMLNSAENLEERNPEVRLIMKVNTSPSAGYIRFYNEFAKRPIMYLNYVYTKAEVKFTNTEKLLTTIHKGLIKALDLGMGQEILVYSPIVSMTKIQKTPLPERKALPIRWITWMSYLEDPRIQFHYDKTLPELQQVPTVTDDIIAKIKHPSEFSMVFYTDGSAIKHPNVNKSHNAGMGIAQVQFKPEFTVINTWSIPLGDHTAQLAEVAAVEFACKKALKIDGPVLIVTDSFYVAESVNKELPYWQSNGFFNNKKKPLKHVSKWKSIADCIQLKPDIIIIHEKGHQPTASTFHTEGNNLADKLATQGSYVVNAGKRTADGSEFEKRTADGSEFESPKKKAKVE

SEQ ID NO: 7400 - protein, 2092 aa, synthetic construct
MPAAKRVKLDGGDKKYSIGLDIGTNSVGWAVITDEYKVPSKKFKVLGNTDRHSIKKNLIGALLFDSGETAEATRLKRTARRRYTRRKNRICYLQEIFSNEMAKVDDSFFHRLEESFLVEEDKKHERHPIFGNIVDEVAYHEKYPTIYHLRKKLVDSTDKADLRLIYLALAHMIKFRGHFLIEGDLNPDNSDVDKLFIQLVQTYNQLFEENPINASGVDAKAILSARLSKSRRLENLIAQLPGEKKNGLFGNLIALSLGLTPNFKSNFDLAEDAKLQLSKDTYDDDLDNLLAQIGDQYADLFLAAKNLSDAILLSDILRVNTEITKAPLSASMIKRYDEHHQDLTLLKALVRQQLPEKYKEIFFDQSKNGYAGYIDGGASQEEFYKFIKPILEKMDGTEELLVKLNREDLLRKQRTFDNGSIPHQIHLGELHAILRRQEDFYPFLKDNREKIEKILTFRIPYYVGPLARGNSRFAWMTRKSEETITPWNFEEVVDKGASAQSFIERMTNFDKNLPNEKVLPKHSLLYEYFTVYNELTKVKYVTEGMRKPAFLSGEQKKAIVDLLFKTNRKVTVKQLKEDYFKKIECFDSVEISGVEDRFNASLGTYHDLLKIIKDKDFLDNEENEDILEDIVLTLTLFEDREMIEERLKTYAHLFDDKVMKQLKRRRYTGWGRLSRKLINGIRDKQSGKTILDFLKSDGFANRNFMQLIHDDSLTFKEDIQKAQVSGQGDSLHEHIANLAGSPAIKKGILQTVKVVDELVKVMGRHKPENIVIEMARENQTTQKGQKNSRERMKRIEEGIKELGSQILKEHPVENTQLQNEKLYLYYLQNGRDMYVDQELDINRLSDYDVDHIVPQSFLKDDSIDNKVLTRSDKARGKSDNVPSEEVVKKMKNYWRQLLNAKLITQRKFDNLTKAERGGLSELDKAGFIKRQLVETRQITKHVAQILDSRMNTKYDENDKLIREVKVITLKSKLVSDFRKDFQFYKVREINNYHHAHDAYLNAVVGTALIKKYPKLESEFVYGDYKVYDVRKMIAKSEQEIGKATAKYFFYSNIMNFFKTEITLANGEIRKRPLIETNGETGEIVWDKGRDFATVRKVLSMPQVNIVKKTEVQTGGFSKESILPKRNSDKLIARKKDWDPKKYGGFDSPTVAYSVLVVAKVEKGKSKKLKSVKELLGITIMERSSFEKNPIDFLEAKGYKEVKKDLIIKLPKYSLFELENGRKRMLASAGELQKGNELALPSKYVNFLYLASHYEKLKGSPEDNEQKQLFVEQHKHYLDEIIEQISEFSKRVILADANLDKVLSAYNKHRDKPIREQAENIIHLFTLTNLGAPAAFKYFDTTIDRKRYTSTKEVLDATLIHQSITGLYETRIDLSQLGGDGGGSSGGGPAPGGVLNLEEEYRLHEKPVPSSIDPSWLQLFPTVWAERAGMGLANQVPPVVVELRSGASPVAVRQYPMSKEAREGIRPHIQRFLDLGVLVPCQSPWNTPLLPVKKPGTNDYRPVQDLREINKRVQDIHPTVPNPYNLLSSLPPSHTWYSVLDLKDAFFCLKLHPNSQPLFAFEWRDPEKGNTGQLTWTRLPQGFKNSPTLFNEALHRDLAPFRALNPQVVLLQYVDDLLVAAPTYRDCKEGTQKLLQELSKLGYRVSAKKAQLCQKEVTYLGYLLKEGKRWLTPARKATVMKIPPPTTPRQVREFLGKAGFCRLFIPGFASLAAPLYPLTKPSIPFIWTEEHQKAFDRIKEALLSAPALALPDLTKPFTLYVDERAGVARGVLTQTLGPWRRPVAYLSKKLDPVASGWPTCLKAVAAVALLLKDADKLTLGQNVTVIASHSLESIVRQPPDRWMTNARMTHYQSLLLNERVSFAPPAVLNPATLLPVESEATPVHRCSEILAEETGTRRDLKDQPLPGVPAWYTDGSSFIAEGKRRAGAAIVDGKRTVWASSLPEGTSAQKAELVALTQALRLAEGKDINIYTDSRYAFATAHIHGAIYKQRGWLTSAGKDIKNKEEILALLEAIHLPKRVAIIHCPGHQKGNDPVATGNRRADEAAKQAALSTRVLAETTKPAGKRTADGSEFEKRTADGSEFESPKKKAKVE

SEQ ID NO: 7401 - protein, 2094 aa, synthetic construct
MPAAKRVKLDGGDKKYSIGLDIGTNSVGWAVITDEYKVPSKKFKVLGNTDRHSIKKNLIGALLFDSGETAEATRLKRTARRRYTRRKNRICYLQEIFSNEMAKVDDSFFHRLEESFLVEEDKKHERHPIFGNIVDEVAYHEKYPTIYHLRKKLVDSTDKADLRLIYLALAHMIKFRGHFLIEGDLNPDNSDVDKLFIQLVQTYNQLFEENPINASGVDAKAILSARLSKSRRLENLIAQLPGEKKNGLFGNLIALSLGLTPNFKSNFDLAEDAKLQLSKDTYDDDLDNLLAQIGDQYADLFLAAKNLSDAILLSDILRVNTEITKAPLSASMIKRYDEHHQDLTLLKALVRQQLPEKYKEIFFDQSKNGYAGYIDGGASQEEFYKFIKPILEKMDGTEELLVKLNREDLLRKQRTFDNGSIPHQIHLGELHAILRRQEDFYPFLKDNREKIEKILTFRIPYYVGPLARGNSRFAWMTRKSEETITPWNFEEVVDKGASAQSFIERMTNFDKNLPNEKVLPKHSLLYEYFTVYNELTKVKYVTEGMRKPAFLSGEQKKAIVDLLFKTNRKVTVKQLKEDYFKKIECFDSVEISGVEDRFNASLGTYHDLLKIIKDKDFLDNEENEDILEDIVLTLTLFEDREMIEERLKTYAHLFDDKVMKQLKRRRYTGWGRLSRKLINGIRDKQSGKTILDFLKSDGFANRNFMQLIHDDSLTFKEDIQKAQVSGQGDSLHEHIANLAGSPAIKKGILQTVKVVDELVKVMGRHKPENIVIEMARENQTTQKGQKNSRERMKRIEEGIKELGSQILKEHPVENTQLQNEKLYLYYLQNGRDMYVDQELDINRLSDYDVDHIVPQSFLKDDSIDNKVLTRSDKARGKSDNVPSEEVVKKMKNYWRQLLNAKLITQRKFDNLTKAERGGLSELDKAGFIKRQLVETRQITKHVAQILDSRMNTKYDENDKLIREVKVITLKSKLVSDFRKDFQFYKVREINNYHHAHDAYLNAVVGTALIKKYPKLESEFVYGDYKVYDVRKMIAKSEQEIGKATAKYFFYSNIMNFFKTEITLANGEIRKRPLIETNGETGEIVWDKGRDFATVRKVLSMPQVNIVKKTEVQTGGFSKESILPKRNSDKLIARKKDWDPKKYGGFDSPTVAYSVLVVAKVEKGKSKKLKSVKELLGITIMERSSFEKNPIDFLEAKGYKEVKKDLIIKLPKYSLFELENGRKRMLASAGELQKGNELALPSKYVNFLYLASHYEKLKGSPEDNEQKQLFVEQHKHYLDEIIEQISEFSKRVILADANLDKVLSAYNKHRDKPIREQAENIIHLFTLTNLGAPAAFKYFDTTIDRKRYTSTKEVLDATLIHQSITGLYETRIDLSQLGGDGGGSSGGGPAPGGTLNIEDEYRLHETSKEPDVPLGSTWLSDFPQAWAETGGMGLAVRQAPLIIPLKATSTPVSIKQYPMSQEARLGIKPHIQRLLDQGILVPCQSPWNTPLLPVKKPGTNDYRPVQDLREVNKRVEDIHPTVPNPYNLLSGLPPSHQWYTVLDLKDAFFCLRLHPTSQPLFAFEWRDPEMGISGQLTWTRLPQGFKNSPTLFNEALHRDLADFRIQHPDLILLQYVDDLLLAATSEQDCQRGTRALLQTLGNLGYRASAKKAQICQKQVKYLGYLLKEGQRWLTEARKETVMGQPTPKTPRQLREFLGTAGFCRLWIPGFAEMAAPLYPLTKPGTLFNWGPDQQKAYQEIKQALLTAPALGLPDLTKPFELFVDEKQGYAKGVLTQKLGPWRRPVAYLSKKLDPVAAGWPPCLRMVAAIAVLTKDAGKLTMGQPLVILAPHAVEALVKQPPDRWLSNARMTHYQAMLLDTDRVQFGPVVALNPATLLPLPEKEAPHDCLEILAETHGTRPDLTDQPIPDADYTWYTDGSSFLQEGQRRAGAAVTTETEVIWARALPAGTSAQRAELIALTQALKMAEGKKLNVYTDSRYAFATAHVHGEIYRRRGWLTSEGREIKNKNEILALLKALFLPKRLSIIHCPGHQKGNSAEARGNRMADQAAREAAMKAVLETSTLLAGKRTADGSEFEKRTADGSEFESPKKKAKVE

SEQ ID NO: 7402 - protein, 2096 aa, synthetic construct
MPAAKRVKLDGGDKKYSIGLDIGTNSVGWAVITDEYKVPSKKFKVLGNTDRHSIKKNLIGALLFDSGETAEATRLKRTARRRYTRRKNRICYLQEIFSNEMAKVDDSFFHRLEESFLVEEDKKHERHPIFGNIVDEVAYHEKYPTIYHLRKKLVDSTDKADLRLIYLALAHMIKFRGHFLIEGDLNPDNSDVDKLFIQLVQTYNQLFEENPINASGVDAKAILSARLSKSRRLENLIAQLPGEKKNGLFGNLIALSLGLTPNFKSNFDLAEDAKLQLSKDTYDDDLDNLLAQIGDQYADLFLAAKNLSDAILLSDILRVNTEITKAPLSASMIKRYDEHHQDLTLLKALVRQQLPEKYKEIFFDQSKNGYAGYIDGGASQEEFYKFIKPILEKMDGTEELLVKLNREDLLRKQRTFDNGSIPHQIHLGELHAILRRQEDFYPFLKDNREKIEKILTFRIPYYVGPLARGNSRFAWMTRKSEETITPWNFEEVVDKGASAQSFIERMTNFDKNLPNEKVLPKHSLLYEYFTVYNELTKVKYVTEGMRKPAFLSGEQKKAIVDLLFKTNRKVTVKQLKEDYFKKIECFDSVEISGVEDRFNASLGTYHDLLKIIKDKDFLDNEENEDILEDIVLTLTLFEDREMIEERLKTYAHLFDDKVMKQLKRRRYTGWGRLSRKLINGIRDKQSGKTILDFLKSDGFANRNFMQLIHDDSLTFKEDIQKAQVSGQGDSLHEHIANLAGSPAIKKGILQTVKVVDELVKVMGRHKPENIVIEMARENQTTQKGQKNSRERMKRIEEGIKELGSQILKEHPVENTQLQNEKLYLYYLQNGRDMYVDQELDINRLSDYDVDHIVPQSFLKDDSIDNKVLTRSDKARGKSDNVPSEEVVKKMKNYWRQLLNAKLITQRKFDNLTKAERGGLSELDKAGFIKRQLVETRQITKHVAQILDSRMNTKYDENDKLIREVKVITLKSKLVSDFRKDFQFYKVREINNYHHAHDAYLNAVVGTALIKKYPKLESEFVYGDYKVYDVRKMIAKSEQEIGKATAKYFFYSNIMNFFKTEITLANGEIRKRPLIETNGETGEIVWDKGRDFATVRKVLSMPQVNIVKKTEVQTGGFSKESILPKRNSDKLIARKKDWDPKKYGGFDSPTVAYSVLVVAKVEKGKSKKLKSVKELLGITIMERSSFEKNPIDFLEAKGYKEVKKDLIIKLPKYSLFELENGRKRMLASAGELQKGNELALPSKYVNFLYLASHYEKLKGSPEDNEQKQLFVEQHKHYLDEIIEQISEFSKRVILADANLDKVLSAYNKHRDKPIREQAENIIHLFTLTNLGAPAAFKYFDTTIDRKRYTSTKEVLDATLIHQSITGLYETRIDLSQLGGDGGGSSPAPGGGGGTAPLEEEYRLFLEAPIQNVTLLEQWKREIPKVWAEINPPGLASTQAPIHVQLLSTALPVRVRQYPITLEAKRSLRETIRKFRAAGILRPVHSPWNTPLLPVRKSGTSEYRMVQDLREVNKRVETIHPTVPNPYTLLSLLPPDRIWYSVLDLKDAFFCIPLAPESQLIFAFEWADAEEGESGQLTWTRLPQGFKNSPTLFNEALNRDLQGFRLDHPSVSLLQYVDDLLIAADTQAACLSATRDLLMTLAELGYRVSGKKAQLCQEEVTYLGFKIHKGSRSLSNSRTQAILQIPVPKTKRQVREFLGTIGYCRLWIPGFAELAQPLYAATRPGNDPLVWGEKEEEAFQSLKLALTQPPALALPSLDKPFQLFVEETSGAAKGVLTQALGPWKRPVAYLSKRLDPVAAGWPRCLRAIAAAALLTREASKLTFGQDIEITSSHNLESLLRSPPDKWLTNARITQYQVLLLDPPRVRFKQTAALNPATLLPETDDTLPIHHCLDTLDSLTSTRPDLTDQPLAQAEATLFTDGSSYIRDGKRYAGAAVVTLDSVIWAEPLPIGTSAQKAELIALTKALEWSKDKSVNIYTDSRYAFATLHVHGMIYRERGWLTAGGKAIKNAPEILALLTAVWLPKRVAVMHCKGHQKDDAPTSTGNRRADEVAREVAIRPLSTQATISAGKRTADGSEFEKRTADGSEFESPKKKAKVE

SEQ ID NO: 7403 - protein, 2096 aa, synthetic construct
MPAAKRVKLDGGDKKYSIGLDIGTNSVGWAVITDEYKVPSKKFKVLGNTDRHSIKKNLIGALLFDSGETAEATRLKRTARRRYTRRKNRICYLQEIFSNEMAKVDDSFFHRLEESFLVEEDKKHERHPIFGNIVDEVAYHEKYPTIYHLRKKLVDSTDKADLRLIYLALAHMIKFRGHFLIEGDLNPDNSDVDKLFIQLVQTYNQLFEENPINASGVDAKAILSARLSKSRRLENLIAQLPGEKKNGLFGNLIALSLGLTPNFKSNFDLAEDAKLQLSKDTYDDDLDNLLAQIGDQYADLFLAAKNLSDAILLSDILRVNTEITKAPLSASMIKRYDEHHQDLTLLKALVRQQLPEKYKEIFFDQSKNGYAGYIDGGASQEEFYKFIKPILEKMDGTEELLVKLNREDLLRKQRTFDNGSIPHQIHLGELHAILRRQEDFYPFLKDNREKIEKILTFRIPYYVGPLARGNSRFAWMTRKSEETITPWNFEEVVDKGASAQSFIERMTNFDKNLPNEKVLPKHSLLYEYFTVYNELTKVKYVTEGMRKPAFLSGEQKKAIVDLLFKTNRKVTVKQLKEDYFKKIECFDSVEISGVEDRFNASLGTYHDLLKIIKDKDFLDNEENEDILEDIVLTLTLFEDREMIEERLKTYAHLFDDKVMKQLKRRRYTGWGRLSRKLINGIRDKQSGKTILDFLKSDGFANRNFMQLIHDDSLTFKEDIQKAQVSGQGDSLHEHIANLAGSPAIKKGILQTVKVVDELVKVMGRHKPENIVIEMARENQTTQKGQKNSRERMKRIEEGIKELGSQILKEHPVENTQLQNEKLYLYYLQNGRDMYVDQELDINRLSDYDVDHIVPQSFLKDDSIDNKVLTRSDKARGKSDNVPSEEVVKKMKNYWRQLLNAKLITQRKFDNLTKAERGGLSELDKAGFIKRQLVETRQITKHVAQILDSRMNTKYDENDKLIREVKVITLKSKLVSDFRKDFQFYKVREINNYHHAHDAYLNAVVGTALIKKYPKLESEFVYGDYKVYDVRKMIAKSEQEIGKATAKYFFYSNIMNFFKTEITLANGEIRKRPLIETNGETGEIVWDKGRDFATVRKVLSMPQVNIVKKTEVQTGGFSKESILPKRNSDKLIARKKDWDPKKYGGFDSPTVAYSVLVVAKVEKGKSKKLKSVKELLGITIMERSSFEKNPIDFLEAKGYKEVKKDLIIKLPKYSLFELENGRKRMLASAGELQKGNELALPSKYVNFLYLASHYEKLKGSPEDNEQKQLFVEQHKHYLDEIIEQISEFSKRVILADANLDKVLSAYNKHRDKPIREQAENIIHLFTLTNLGAPAAFKYFDTTIDRKRYTSTKEVLDATLIHQSITGLYETRIDLSQLGGDGGGSSPAPGGGGGTAPLEEEYRLFLEAPIQNVTLLEQWKREIPKVWAEINPPGLASTQAPIHVQLLSTALPVRVRQYPITLEAKRSLRETIRKFRAAGILRPVHSPWNTPLLPVRKSGTSEYRMVQDLREVNKRVETIHPTVPNPYTLLSLLPPDRIWYSVLDLKDAFFCIPLAPESQLIFAFEWADAEEGESGQLTWTRLPQGFKNSPTLFNEALNRDLQGFRLDHPSVSLLQYVDDLLIAADTQAACLSATRDLLMTLAELGYRVSGKKAQLCQEEVTYLGFKIHKGSRSLSNSRTQAILQIPVPKTKRQVREFLGKIGYCRLFIPGFAELAQPLYAATRPGNDPLVWGEKEEEAFQSLKLALTQPPALALPSLDKPFQLFVEETSGAAKGVLTQALGPWKRPVAYLSKRLDPVAAGWPRCLRAIAAAALLTREASKLTFGQDIEITSSHNLESLLRSPPDKWLTNARITQYQVLLLDPPRVRFKQTAALNPATLLPETDDTLPIHHCLDTLDSLTSTRPDLTDQPLAQAEATLFTDGSSYIRDGKRYAGAAVVTLDSVIWAEPLPIGTSAQKAELIALTKALEWSKDKSVNIYTDSRYAFATLHVHGMIYRERGWLTAGGKAIKNAPEILALLTAVWLPKRVAVMHCKGHQKDDAPTSTGNRRADEVAREVAIRPLSTQATISAGKRTADGSEFEKRTADGSEFESPKKKAKVE

SEQ ID NO: 7404 - protein, 2092 aa, synthetic construct
MPAAKRVKLDGGDKKYSIGLDIGTNSVGWAVITDEYKVPSKKFKVLGNTDRHSIKKNLIGALLFDSGETAEATRLKRTARRRYTRRKNRICYLQEIFSNEMAKVDDSFFHRLEESFLVEEDKKHERHPIFGNIVDEVAYHEKYPTIYHLRKKLVDSTDKADLRLIYLALAHMIKFRGHFLIEGDLNPDNSDVDKLFIQLVQTYNQLFEENPINASGVDAKAILSARLSKSRRLENLIAQLPGEKKNGLFGNLIALSLGLTPNFKSNFDLAEDAKLQLSKDTYDDDLDNLLAQIGDQYADLFLAAKNLSDAILLSDILRVNTEITKAPLSASMIKRYDEHHQDLTLLKALVRQQLPEKYKEIFFDQSKNGYAGYIDGGASQEEFYKFIKPILEKMDGTEELLVKLNREDLLRKQRTFDNGSIPHQIHLGELHAILRRQEDFYPFLKDNREKIEKILTFRIPYYVGPLARGNSRFAWMTRKSEETITPWNFEEVVDKGASAQSFIERMTNFDKNLPNEKVLPKHSLLYEYFTVYNELTKVKYVTEGMRKPAFLSGEQKKAIVDLLFKTNRKVTVKQLKEDYFKKIECFDSVEISGVEDRFNASLGTYHDLLKIIKDKDFLDNEENEDILEDIVLTLTLFEDREMIEERLKTYAHLFDDKVMKQLKRRRYTGWGRLSRKLINGIRDKQSGKTILDFLKSDGFANRNFMQLIHDDSLTFKEDIQKAQVSGQGDSLHEHIANLAGSPAIKKGILQTVKVVDELVKVMGRHKPENIVIEMARENQTTQKGQKNSRERMKRIEEGIKELGSQILKEHPVENTQLQNEKLYLYYLQNGRDMYVDQELDINRLSDYDVDHIVPQSFLKDDSIDNKVLTRSDKARGKSDNVPSEEVVKKMKNYWRQLLNAKLITQRKFDNLTKAERGGLSELDKAGFIKRQLVETRQITKHVAQILDSRMNTKYDENDKLIREVKVITLKSKLVSDFRKDFQFYKVREINNYHHAHDAYLNAVVGTALIKKYPKLESEFVYGDYKVYDVRKMIAKSEQEIGKATAKYFFYSNIMNFFKTEITLANGEIRKRPLIETNGETGEIVWDKGRDFATVRKVLSMPQVNIVKKTEVQTGGFSKESILPKRNSDKLIARKKDWDPKKYGGFDSPTVAYSVLVVAKVEKGKSKKLKSVKELLGITIMERSSFEKNPIDFLEAKGYKEVKKDLIIKLPKYSLFELENGRKRMLASAGELQKGNELALPSKYVNFLYLASHYEKLKGSPEDNEQKQLFVEQHKHYLDEIIEQISEFSKRVILADANLDKVLSAYNKHRDKPIREQAENIIHLFTLTNLGAPAAFKYFDTTIDRKRYTSTKEVLDATLIHQSITGLYETRIDLSQLGGDGGGSSPAPGGGGGVLNLEEEYRLHEKPVPSSIDPSWLQLFPTVWAERAGMGLANQVPPVVVELRSGASPVAVRQYPMSKEAREGIRPHIQKFLDLGVLVPCRSPWNTPLLPVKKPGTNDYRPVQDLREINKRVQDIHPTVPNPYNLLSSLPPSYTWYSVLDLKDAFFCLRLHPNSQPLFAFEWKDPEKGNTGQLTWTRLPQGFKNSPTLFNEALHRDLAPFRALNPQVVLLQYVDDLLVAAPTYEDCKKGTQKLLQELSKLGYRVSAKKAQLCQREVTYLGYLLKEGKRWLTPARKATVMKIPVPTTPRQVREFLGKAGFCRLFIPGFASLAAPLYPLTKPSIPFIWTEEHQQAFDHIKKALLSAPALALPDLTKPFTLYIDERAGVARGVLTQTLGPWRRPVAYLSKKLDPVASGWPTCLKAVAAVALLLKDADKLTLGQNVTVIASHSLESIVRQPPDRWMTNARMTHYQSLLLNERVSFAPPAVLNPATLLPVESEATPVHRCSEILAEETGTRRDLEDQPLPGVPTWYTDGSSFITEGKRRAGAPIVDGKRTVWASSLPEGTSAQKAELVALTQALRLAEGKNINIYTDSRYAFATAHIHGAIYKQRGWLTSAGKDIKNKEEILALLEAIHLPRRVAIIHCPGHQRGSNPVATGNRRADEAAKQAALSTRVLAGTTKPAGKRTADGSEFEKRTADGSEFESPKKKAKVE

SEQ ID NO: 7405 - protein, 2125 aa, synthetic construct
MPAAKRVKLDGGDKKYSIGLDIGTNSVGWAVITDEYKVPSKKFKVLGNTDRHSIKKNLIGALLFDSGETAEATRLKRTARRRYTRRKNRICYLQEIFSNEMAKVDDSFFHRLEESFLVEEDKKHERHPIFGNIVDEVAYHEKYPTIYHLRKKLVDSTDKADLRLIYLALAHMIKFRGHFLIEGDLNPDNSDVDKLFIQLVQTYNQLFEENPINASGVDAKAILSARLSKSRRLENLIAQLPGEKKNGLFGNLIALSLGLTPNFKSNFDLAEDAKLQLSKDTYDDDLDNLLAQIGDQYADLFLAAKNLSDAILLSDILRVNTEITKAPLSASMIKRYDEHHQDLTLLKALVRQQLPEKYKEIFFDQSKNGYAGYIDGGASQEEFYKFIKPILEKMDGTEELLVKLNREDLLRKQRTFDNGSIPHQIHLGELHAILRRQEDFYPFLKDNREKIEKILTFRIPYYVGPLARGNSRFAWMTRKSEETITPWNFEEVVDKGASAQSFIERMTNFDKNLPNEKVLPKHSLLYEYFTVYNELTKVKYVTEGMRKPAFLSGEQKKAIVDLLFKTNRKVTVKQLKEDYFKKIECFDSVEISGVEDRFNASLGTYHDLLKIIKDKDFLDNEENEDILEDIVLTLTLFEDREMIEERLKTYAHLFDDKVMKQLKRRRYTGWGRLSRKLINGIRDKQSGKTILDFLKSDGFANRNFMQLIHDDSLTFKEDIQKAQVSGQGDSLHEHIANLAGSPAIKKGILQTVKVVDELVKVMGRHKPENIVIEMARENQTTQKGQKNSRERMKRIEEGIKELGSQILKEHPVENTQLQNEKLYLYYLQNGRDMYVDQELDINRLSDYDVDHIVPQSFLKDDSIDNKVLTRSDKARGKSDNVPSEEVVKKMKNYWRQLLNAKLITQRKFDNLTKAERGGLSELDKAGFIKRQLVETRQITKHVAQILDSRMNTKYDENDKLIREVKVITLKSKLVSDFRKDFQFYKVREINNYHHAHDAYLNAVVGTALIKKYPKLESEFVYGDYKVYDVRKMIAKSEQEIGKATAKYFFYSNIMNFFKTEITLANGEIRKRPLIETNGETGEIVWDKGRDFATVRKVLSMPQVNIVKKTEVQTGGFSKESILPKRNSDKLIARKKDWDPKKYGGFDSPTVAYSVLVVAKVEKGKSKKLKSVKELLGITIMERSSFEKNPIDFLEAKGYKEVKKDLIIKLPKYSLFELENGRKRMLASAGELQKGNELALPSKYVNFLYLASHYEKLKGSPEDNEQKQLFVEQHKHYLDEIIEQISEFSKRVILADANLDKVLSAYNKHRDKPIREQAENIIHLFTLTNLGAPAAFKYFDTTIDRKRYTSTKEVLDATLIHQSITGLYETRIDLSQLGGDGGGSSPAPGGGGGLLGRDLLTKLKAQIQFSTEGPQVTWEDRPAMCLVLNLEEEYRLHEKPVPPSIDPSWLQLFPMVWAEKAGMGLANQVPPVVVELKSDASPVAVRQYPMSKEAREGIRPHIQRFLDLGILVPCQSPWNTPLLPVKKPGTNDYRPVQDLREVNKRVQDIHPTVPNPYNLLSSLPPSHTWYSVLDLKDAFFCLKLHPNSQPLFAFEWRDPEKGNTGQLTWTRLPQGFKNSPTLFDEALHRDLASFRALNPQVVMLQYVDDLLVAAPTYRDCKEGTRRLLQELSKLGYRVSAKKAQLCREEVTYLGYLLKGGKRWLTPARKATVMKIPTPTTPRQVREFLGTAGFCRLWIPGFASLAAPLYPLTREKVPFTWTEAHQEAFGRIKEALLSAPALALPDLTKPFALYVDEKEGVARGVLTQTLGPWRRPVAYLSKKLDPVASGWPTCLKAIAAVALLLKDADKLTLGQNVLVIAPHNLESIVRQPPDRWMTNARMTHYQSLLLNERVSFAPPAILNPATLLPVESDDTPIHICSEILAEETGTRPDLRDQPLPGVPAWYTDGSSFIMDGRRQAGAAIVDNKRTVWASNLPEGTSAQKAELIALTQALRLAEGKSINIYTDSRYAFATAHVHGAIYKQRGLLTSAGKDIKNKEEILALLEAIHLPKRVAIIHCPGHQRGTDPVATGNRKADEAAKQAAQSTRILTETTKNAGKRTADGSEFEKRTADGSEFESPKKKAKVE

SEQ ID NO: 7406 - protein, 2216 aa, synthetic construct
MPAAKRVKLDGGDKKYSIGLDIGTNSVGWAVITDEYKVPSKKFKVLGNTDRHSIKKNLIGALLFDSGETAEATRLKRTARRRYTRRKNRICYLQEIFSNEMAKVDDSFFHRLEESFLVEEDKKHERHPIFGNIVDEVAYHEKYPTIYHLRKKLVDSTDKADLRLIYLALAHMIKFRGHFLIEGDLNPDNSDVDKLFIQLVQTYNQLFEENPINASGVDAKAILSARLSKSRRLENLIAQLPGEKKNGLFGNLIALSLGLTPNFKSNFDLAEDAKLQLSKDTYDDDLDNLLAQIGDQYADLFLAAKNLSDAILLSDILRVNTEITKAPLSASMIKRYDEHHQDLTLLKALVRQQLPEKYKEIFFDQSKNGYAGYIDGGASQEEFYKFIKPILEKMDGTEELLVKLNREDLLRKQRTFDNGSIPHQIHLGELHAILRRQEDFYPFLKDNREKIEKILTFRIPYYVGPLARGNSRFAWMTRKSEETITPWNFEEVVDKGASAQSFIERMTNFDKNLPNEKVLPKHSLLYEYFTVYNELTKVKYVTEGMRKPAFLSGEQKKAIVDLLFKTNRKVTVKQLKEDYFKKIECFDSVEISGVEDRFNASLGTYHDLLKIIKDKDFLDNEENEDILEDIVLTLTLFEDREMIEERLKTYAHLFDDKVMKQLKRRRYTGWGRLSRKLINGIRDKQSGKTILDFLKSDGFANRNFMQLIHDDSLTFKEDIQKAQVSGQGDSLHEHIANLAGSPAIKKGILQTVKVVDELVKVMGRHKPENIVIEMARENQTTQKGQKNSRERMKRIEEGIKELGSQILKEHPVENTQLQNEKLYLYYLQNGRDMYVDQELDINRLSDYDVDHIVPQSFLKDDSIDNKVLTRSDKARGKSDNVPSEEVVKKMKNYWRQLLNAKLITQRKFDNLTKAERGGLSELDKAGFIKRQLVETRQITKHVAQILDSRMNTKYDENDKLIREVKVITLKSKLVSDFRKDFQFYKVREINNYHHAHDAYLNAVVGTALIKKYPKLESEFVYGDYKVYDVRKMIAKSEQEIGKATAKYFFYSNIMNFFKTEITLANGEIRKRPLIETNGETGEIVWDKGRDFATVRKVLSMPQVNIVKKTEVQTGGFSKESILPKRNSDKLIARKKDWDPKKYGGFDSPTVAYSVLVVAKVEKGKSKKLKSVKELLGITIMERSSFEKNPIDFLEAKGYKEVKKDLIIKLPKYSLFELENGRKRMLASAGELQKGNELALPSKYVNFLYLASHYEKLKGSPEDNEQKQLFVEQHKHYLDEIIEQISEFSKRVILADANLDKVLSAYNKHRDKPIREQAENIIHLFTLTNLGAPAAFKYFDTTIDRKRYTSTKEVLDATLIHQSITGLYETRIDLSQLGGDGGGSSPAPGGGGGTLGDQGSRGSDPLPEPRVTLTVEGIPTEFLVNTGAEHSVLTKPMGKMGSKRTVVAGATGSKVYPWTTKRLLKIGQKQVTHSFLVIPECPAPLLGRDLLTKLKAQIQFSTEGPQVTWEDRPAMCLVLNLEEEYRLHEKPVPPSIDPSWLQLFPMVWAEKAGMGLANQVPPVVVELKSDASPVAVRQYPMSKEAREGIRPHIQRFLDLGILVPCQSPWNTPLLPVKKPGTNDYRPVQDLREVNKRVQDIHPTVPNPYNLLSSLPPSHTWYSVLDLKDAFFCLKLHPNSQPLFAFEWRDPEKGNTGQLTWTRLPQGFKNSPTLFNEALHRDLASFRALNPQVVMLQYVDDLLVAAPTYRDCKEGTRRLLQELSKLGYRVSAKKAQLCREEVTYLGYLLKGGKRWLTPARKATVMKIPTPTTPRQVREFLGTAGFCRLWIPGFASLAAPLYPLTRPKVPFTWTEAHQEAFGRIKEALLSAPALALPDLTKPFALYVDEKEGVARGVLTQTLGPWRRPVAYLSKKLDPVASGWPTCLKAIAAVALLLKDADKLTLGQNVLVIAPHNLESIVRQPPDRWMTNARMTHYQSLLLNERVSFAPPAILNPATLLPVESDDTPIHICSEILAEETGTRPDLRDQPLPGVPAWYTDGSSFIMDGRRQAGAAIVDNKRTVWASNLPEGTSAQKAELIALTQALRLAEGKSINIYTDSRYAFATAHVHGAIYKQRGWLTSAGKDIKNKEEILALLEAIHLPKRVAIIHCPGHQRGTDPVATGNRKADEAAKQAAQSTRILTETTKNAGKRTADGSEFEKRTADGSEFESPKKKAKVE

SEQ ID NO: 7407 - protein, 2216 aa, synthetic construct
MPAAKRVKLDGGDKKYSIGLDIGTNSVGWAVITDEYKVPSKKFKVLGNTDRHSIKKNLIGALLFDSGETAEATRLKRTARRRYTRRKNRICYLQEIFSNEMAKVDDSFFHRLEESFLVEEDKKHERHPIFGNIVDEVAYHEKYPTIYHLRKKLVDSTDKADLRLIYLALAHMIKFRGHFLIEGDLNPDNSDVDKLFIQLVQTYNQLFEENPINASGVDAKAILSARLSKSRRLENLIAQLPGEKKNGLFGNLIALSLGLTPNFKSNFDLAEDAKLQLSKDTYDDDLDNLLAQIGDQYADLFLAAKNLSDAILLSDILRVNTEITKAPLSASMIKRYDEHHQDLTLLKALVRQQLPEKYKEIFFDQSKNGYAGYIDGGASQEEFYKFIKPILEKMDGTEELLVKLNREDLLRKQRTFDNGSIPHQIHLGELHAILRRQEDFYPFLKDNREKIEKILTFRIPYYVGPLARGNSRFAWMTRKSEETITPWNFEEVVDKGASAQSFIERMTNFDKNLPNEKVLPKHSLLYEYFTVYNELTKVKYVTEGMRKPAFLSGEQKKAIVDLLFKTNRKVTVKQLKEDYFKKIECFDSVEISGVEDRFNASLGTYHDLLKIIKDKDFLDNEENEDILEDIVLTLTLFEDREMIEERLKTYAHLFDDKVMKQLKRRRYTGWGRLSRKLINGIRDKQSGKTILDFLKSDGFANRNFMQLIHDDSLTFKEDIQKAQVSGQGDSLHEHIANLAGSPAIKKGILQTVKVVDELVKVMGRHKPENIVIEMARENQTTQKGQKNSRERMKRIEEGIKELGSQILKEHPVENTQLQNEKLYLYYLQNGRDMYVDQELDINRLSDYDVDHIVPQSFLKDDSIDNKVLTRSDKARGKSDNVPSEEVVKKMKNYWRQLLNAKLITQRKFDNLTKAERGGLSELDKAGFIKRQLVETRQITKHVAQILDSRMNTKYDENDKLIREVKVITLKSKLVSDFRKDFQFYKVREINNYHHAHDAYLNAVVGTALIKKYPKLESEFVYGDYKVYDVRKMIAKSEQEIGKATAKYFFYSNIMNFFKTEITLANGEIRKRPLIETNGETGEIVWDKGRDFATVRKVLSMPQVNIVKKTEVQTGGFSKESILPKRNSDKLIARKKDWDPKKYGGFDSPTVAYSVLVVAKVEKGKSKKLKSVKELLGITIMERSSFEKNPIDFLEAKGYKEVKKDLIIKLPKYSLFELENGRKRMLASAGELQKGNELALPSKYVNFLYLASHYEKLKGSPEDNEQKQLFVEQHKHYLDEIIEQISEFSKRVILADANLDKVLSAYNKHRDKPIREQAENIIHLFTLTNLGAPAAFKYFDTTIDRKRYTSTKEVLDATLIHQSITGLYETRIDLSQLGGDGGGSSPAPGGGGGTLGDQGSRGSDPLPEPRVTLTVEGIPTEFLVNTGAEHSVLTKPMGKMGSKRTVVAGATGSKVYPWTTKRLLKIGQKQVTHSFLVIPECPAPLLGRDLLTKLKAQIQFSTEGPQVTWEDRPAMCLVLNLEEEYRLHEKPVPPSIDPSWLQLFPMVWAEKAGMGLANQVPPVVVELKSDASPVAVRQYPMSKEAREGIRPHIQRFLDLGILVPCQSPWNTPLLPVKKPGTNDYRPVQDLREVNKRVQDIHPTVPNPYNLLSSLPPSHTWYSVLDLKDAFFCLKLHPNSQPLFAFEWRDPEKGNTGQLTWTRLPQGFKNSPTLFNEALHRDLASFRALNPQVVMLQYVDDLLVAAPTYRDCKEGTRRLLQELSKLGYRVSAKKAQLCREEVTYLGYLLKGGKRWLTPARKATVMKIPTPTTPRQVREFLGKAGFCRLFIPGFASLAAPLYPLTRPKVPFTWTEAHQEAFGRIKEALLSAPALALPDLTKPFALYVDEKEGVARGVLTQTLGPWRRPVAYLSKKLDPVASGWPTCLKAIAAVALLLKDADKLTLGQNVLVIAPHNLESIVRQPPDRWMTNARMTHYQSLLLNERVSFAPPAILNPATLLPVESDDTPIHICSEILAEETGTRPDLRDQPLPGVPAWYTDGSSFIMDGRRQAGAAIVDNKRTVWASNLPEGTSAQKAELIALTQALRLAEGKSINIYTDSRYAFATAHVHGAIYKQRGWLTSAGKDIKNKEEILALLEAIHLPKRVAIIHCPGHQRGTDPVATGNRKADEAAKQAAQSTRILTETTKNAGKRTADGSEFEKRTADGSEFESPKKKAKVE

SEQ ID NO: 7408 - protein, 2094 aa, synthetic construct
MPAAKRVKLDGGDKKYSIGLDIGTNSVGWAVITDEYKVPSKKFKVLGNTDRHSIKKNLIGALLFDSGETAEATRLKRTARRRYTRRKNRICYLQEIFSNEMAKVDDSFFHRLEESFLVEEDKKHERHPIFGNIVDEVAYHEKYPTIYHLRKKLVDSTDKADLRLIYLALAHMIKFRGHFLIEGDLNPDNSDVDKLFIQLVQTYNQLFEENPINASGVDAKAILSARLSKSRRLENLIAQLPGEKKNGLFGNLIALSLGLTPNFKSNFDLAEDAKLQLSKDTYDDDLDNLLAQIGDQYADLFLAAKNLSDAILLSDILRVNTEITKAPLSASMIKRYDEHHQDLTLLKALVRQQLPEKYKEIFFDQSKNGYAGYIDGGASQEEFYKFIKPILEKMDGTEELLVKLNREDLLRKQRTFDNGSIPHQIHLGELHAILRRQEDFYPFLKDNREKIEKILTFRIPYYVGPLARGNSRFAWMTRKSEETITPWNFEEVVDKGASAQSFIERMTNFDKNLPNEKVLPKHSLLYEYFTVYNELTKVKYVTEGMRKPAFLSGEQKKAIVDLLFKTNRKVTVKQLKEDYFKKIECFDSVEISGVEDRFNASLGTYHDLLKIIKDKDFLDNEENEDILEDIVLTLTLFEDREMIEERLKTYAHLFDDKVMKQLKRRRYTGWGRLSRKLINGIRDKQSGKTILDFLKSDGFANRNFMQLIHDDSLTFKEDIQKAQVSGQGDSLHEHIANLAGSPAIKKGILQTVKVVDELVKVMGRHKPENIVIEMARENQTTQKGQKNSRERMKRIEEGIKELGSQILKEHPVENTQLQNEKLYLYYLQNGRDMYVDQELDINRLSDYDVDHIVPQSFLKDDSIDNKVLTRSDKARGKSDNVPSEEVVKKMKNYWRQLLNAKLITQRKFDNLTKAERGGLSELDKAGFIKRQLVETRQITKHVAQILDSRMNTKYDENDKLIREVKVITLKSKLVSDFRKDFQFYKVREINNYHHAHDAYLNAVVGTALIKKYPKLESEFVYGDYKVYDVRKMIAKSEQEIGKATAKYFFYSNIMNFFKTEITLANGEIRKRPLIETNGETGEIVWDKGRDFATVRKVLSMPQVNIVKKTEVQTGGFSKESILPKRNSDKLIARKKDWDPKKYGGFDSPTVAYSVLVVAKVEKGKSKKLKSVKELLGITIMERSSFEKNPIDFLEAKGYKEVKKDLIIKLPKYSLFELENGRKRMLASAGELQKGNELALPSKYVNFLYLASHYEKLKGSPEDNEQKQLFVEQHKHYLDEIIEQISEFSKRVILADANLDKVLSAYNKHRDKPIREQAENIIHLFTLTNLGAPAAFKYFDTTIDRKRYTSTKEVLDATLIHQSITGLYETRIDLSQLGGDGGGSSPAPGGGGGTLNLEDEYRLYETSAEPEVSPGSTWLSDFPQAWAETGGMGLAVRQAPLIIPLKATSTPVSIKQYPMSQEAKLGIKPHIQRLLDQGILVPCQSPWNTPLLPVKKPGTNDYRPVQDLREVNKRVEDIHPTVPNPYNLLSGLPPSHRWYTVLDLKDAFFCLRLHPTSQPLFAFEWRDPGMGISGQLTWTRLPQGFKNSPTLFNEALHRDLADFRIQHPDLILLQYVDDILLAATSELDCQQGTRALLLTLGNLGYRASAKKAQLCQKQVKYLGYLLKEGQRWLTEARKETVMGQPTPKTPRQLREFLGTAGFCRLWIPGFAEMAAPLYPLTKPGTLFNWGPDQQKAYQEIKQALLTAPALGLPDLTKPFELFVDEKQGYAKGVLTQKLGPWRRPVAYLSKKLDPVAAGWPPCLRMVAAIAVLRKDAGKLTMGQPLVILAPHAVEALVKQPPDRWLSNARMTHYQAMLLDTDRVQFGPVVALNPATLLPLPEEGAPHDCLEILAETHGTRPDLTDQPIPDADHTWYTDGSSFLQEGQRKAGAAVTTETEVIWARALPAGTSAQRAELIALTQALKMAEGKRLNVYTDSRYAFATAHIHGEIYRRRGWLTSEGREIKNKSEILALLKALFLPKRLSIIHCLGHQKGDSAEARGNRLADQAAREAAIKTPPDTSTLLAGKRTADGSEFEKRTADGSEFESPKKKAKVE

SEQ ID NO: 7409 - protein, 2094 aa, synthetic construct
MPAAKRVKLDGGDKKYSIGLDIGTNSVGWAVITDEYKVPSKKFKVLGNTDRHSIKKNLIGALLFDSGETAEATRLKRTARRRYTRRKNRICYLQEIFSNEMAKVDDSFFHRLEESFLVEEDKKHERHPIFGNIVDEVAYHEKYPTIYHLRKKLVDSTDKADLRLIYLALAHMIKFRGHFLIEGDLNPDNSDVDKLFIQLVQTYNQLFEENPINASGVDAKAILSARLSKSRRLENLIAQLPGEKKNGLFGNLIALSLGLTPNFKSNFDLAEDAKLQLSKDTYDDDLDNLLAQIGDQYADLFLAAKNLSDAILLSDILRVNTEITKAPLSASMIKRYDEHHQDLTLLKALVRQQLPEKYKEIFFDQSKNGYAGYIDGGASQEEFYKFIKPILEKMDGTEELLVKLNREDLLRKQRTFDNGSIPHQIHLGELHAILRRQEDFYPFLKDNREKIEKILTFRIPYYVGPLARGNSRFAWMTRKSEETITPWNFEEVVDKGASAQSFIERMTNFDKNLPNEKVLPKHSLLYEYFTVYNELTKVKYVTEGMRKPAFLSGEQKKAIVDLLFKTNRKVTVKQLKEDYFKKIECFDSVEISGVEDRFNASLGTYHDLLKIIKDKDFLDNEENEDILEDIVLTLTLFEDREMIEERLKTYAHLFDDKVMKQLKRRRYTGWGRLSRKLINGIRDKQSGKTILDFLKSDGFANRNFMQLIHDDSLTFKEDIQKAQVSGQGDSLHEHIANLAGSPAIKKGILQTVKVVDELVKVMGRHKPENIVIEMARENQTTQKGQKNSRERMKRIEEGIKELGSQILKEHPVENTQLQNEKLYLYYLQNGRDMYVDQELDINRLSDYDVDHIVPQSFLKDDSIDNKVLTRSDKARGKSDNVPSEEVVKKMKNYWRQLLNAKLITQRKFDNLTKAERGGLSELDKAGFIKRQLVETRQITKHVAQILDSRMNTKYDENDKLIREVKVITLKSKLVSDFRKDFQFYKVREINNYHHAHDAYLNAVVGTALIKKYPKLESEFVYGDYKVYDVRKMIAKSEQEIGKATAKYFFYSNIMNFFKTEITLANGEIRKRPLIETNGETGEIVWDKGRDFATVRKVLSMPQVNIVKKTEVQTGGFSKESILPKRNSDKLIARKKDWDPKKYGGFDSPTVAYSVLVVAKVEKGKSKKLKSVKELLGITIMERSSFEKNPIDFLEAKGYKEVKKDLIIKLPKYSLFELENGRKRMLASAGELQKGNELALPSKYVNFLYLASHYEKLKGSPEDNEQKQLFVEQHKHYLDEIIEQISEFSKRVILADANLDKVLSAYNKHRDKPIREQAENIIHLFTLTNLGAPAAFKYFDTTIDRKRYTSTKEVLDATLIHQSITGLYETRIDLSQLGGDGGGSSPAPGGGGGTLNIEDEYRLHETSKGPDVPLGSTWLSDFPQAWAETGGMGLAFRQAPLIISLKATSTPVSIKQYPMSQEARLGIKPHIQRLLDQGILVPCQSPWNTPLLPVKKPGTNDYRPVQDLREVNKRVEDIHPTVPNPYNLLSGLPPSHQWYTVLDLKDAFFCLRLHPTSQSLFAFEWKDPEMGISGQLTWTRLPQGFKNSPTLFNEALHRDLADFRIQHPDLILLQYVDDLLLAATSELDCQQGTRALLQTLGDLGYRASAKKAQICQKQVKYLGYLLKEGQRWLTEARKETVMGQPTPKTPRQLREFLGTAGLCRLWIPGFAEMAAPLYPLTKPGTLFKWGPDQQKAYQEIKQALLTAPALGLPDLTKPFELFVDEKQGYAKGVLTQKLGPWRRPVAYLSKKLDPVAAGWPPCLRMVAAIAVLTKDVGKLTMGQPLVILAPHAVEALVKQPPDRWLSNARMTHYQALLLDTDRVQFGPIVALNPATLLPLPEEGLQHDCLDILAEAHGTRPDLTDQPLPDADHTWYTDGSSFLQEGQRRAGAAVTTETEVIWAKALPAGTSAQRAELIALTQALKMAAGKKLNVYTDSRYAFATAHIHGEIYRRRGWLTSEGKEIKNKDEILALLKALFLPKRLSIIHCPGHQKGNHAEARGNRMADQAAREVATRETPETSTLLAGKRTADGSEFEKRTADGSEFESPKKKAKVE

SEQ ID NO: 7410 - protein, 2094 aa, synthetic construct
MPAAKRVKLDGGDKKYSIGLDIGTNSVGWAVITDEYKVPSKKFKVLGNTDRHSIKKNLIGALLFDSGETAEATRLKRTARRRYTRRKNRICYLQEIFSNEMAKVDDSFFHRLEESFLVEEDKKHERHPIFGNIVDEVAYHEKYPTIYHLRKKLVDSTDKADLRLIYLALAHMIKFRGHFLIEGDLNPDNSDVDKLFIQLVQTYNQLFEENPINASGVDAKAILSARLSKSRRLENLIAQLPGEKKNGLFGNLIALSLGLTPNFKSNFDLAEDAKLQLSKDTYDDDLDNLLAQIGDQYADLFLAAKNLSDAILLSDILRVNTEITKAPLSASMIKRYDEHHQDLTLLKALVRQQLPEKYKEIFFDQSKNGYAGYIDGGASQEEFYKFIKPILEKMDGTEELLVKLNREDLLRKQRTFDNGSIPHQIHLGELHAILRRQEDFYPFLKDNREKIEKILTFRIPYYVGPLARGNSRFAWMTRKSEETITPWNFEEVVDKGASAQSFIERMTNFDKNLPNEKVLPKHSLLYEYFTVYNELTKVKYVTEGMRKPAFLSGEQKKAIVDLLFKTNRKVTVKQLKEDYFKKIECFDSVEISGVEDRFNASLGTYHDLLKIIKDKDFLDNEENEDILEDIVLTLTLFEDREMIEERLKTYAHLFDDKVMKQLKRRRYTGWGRLSRKLINGIRDKQSGKTILDFLKSDGFANRNFMQLIHDDSLTFKEDIQKAQVSGQGDSLHEHIANLAGSPAIKKGILQTVKVVDELVKVMGRHKPENIVIEMARENQTTQKGQKNSRERMKRIEEGIKELGSQILKEHPVENTQLQNEKLYLYYLQNGRDMYVDQELDINRLSDYDVDHIVPQSFLKDDSIDNKVLTRSDKARGKSDNVPSEEVVKKMKNYWRQLLNAKLITQRKFDNLTKAERGGLSELDKAGFIKRQLVETRQITKHVAQILDSRMNTKYDENDKLIREVKVITLKSKLVSDFRKDFQFYKVREINNYHHAHDAYLNAVVGTALIKKYPKLESEFVYGDYKVYDVRKMIAKSEQEIGKATAKYFFYSNIMNFFKTEITLANGEIRKRPLIETNGETGEIVWDKGRDFATVRKVLSMPQVNIVKKTEVQTGGFSKESILPKRNSDKLIARKKDWDPKKYGGFDSPTVAYSVLVVAKVEKGKSKKLKSVKELLGITIMERSSFEKNPIDFLEAKGYKEVKKDLIIKLPKYSLFELENGRKRMLASAGELQKGNELALPSKYVNFLYLASHYEKLKGSPEDNEQKQLFVEQHKHYLDEIIEQISEFSKRVILADANLDKVLSAYNKHRDKPIREQAENIIHLFTLTNLGAPAAFKYFDTTIDRKRYTSTKEVLDATLIHQSITGLYETRIDLSQLGGDGGGSSPAPGGGGGTLNIEDEYRLHETSKGPDVPLGSTWLSDFPQAWAETGGMGLAVRQAPLIIPLKATSTPVSIKQYPMSQEARLGIKPHIQRLLDQGILVPCQSPWNTPLLPVKKPGTNDYRPVQDLREVNKRVEDIHPTVPNPYNLLSGLPPSHQWYTVLDLKDAFFCLRLHPTSQSLFAFEWRDPEMGISGQLTWTRLPQGFKNSPTLFNEALHRDLADFRIQHPDLILLQYVDDLLLAATSELDCQQGTRALLQTLGDLGYRASAKKAQICQKQVKYLGYLLKEGQRWLTEARKETVMGQPTPKTPRQLREFLGTAGFCRLWIPGFAEMAAPLYPLTKPGTLFEWGPDQQKAYQEIKQALLTAPALGLPDLTKPFELFVDEKQGYAKGVLTQKLGPWRRPVAYLSKKLDPVAAGWPPCLRMVAAIAVLTKDAGKLTMGQPLVILAPHAVEALVKQPPDRWLSNARMTHYQALLLDTDRVQFGPIVALNPATLLPLPEEGLQHDCLDILAEAHGTRPDLTDQPLPDADHTWYTDGSSFLQEGQRKAGAAVTTETEVVWAKALPAGTSAQRAELIALTQALKMAEGKKLNVYTDSRYAFATAHIHGEIYRRRGWLTSEGKEIKNKDEILALLKALFLPKRLSIIHCPGHQKGNRAEARGNRMADQAAREVATRETPETSTLLAGKRTADGSEFEKRTADGSEFESPKKKAKVE

SEQ ID NO: 7411 - protein, 2094 aa, synthetic construct
MPAAKRVKLDGGDKKYSIGLDIGTNSVGWAVITDEYKVPSKKFKVLGNTDRHSIKKNLIGALLFDSGETAEATRLKRTARRRYTRRKNRICYLQEIFSNEMAKVDDSFFHRLEESFLVEEDKKHERHPIFGNIVDEVAYHEKYPTIYHLRKKLVDSTDKADLRLIYLALAHMIKFRGHFLIEGDLNPDNSDVDKLFIQLVQTYNQLFEENPINASGVDAKAILSARLSKSRRLENLIAQLPGEKKNGLFGNLIALSLGLTPNFKSNFDLAEDAKLQLSKDTYDDDLDNLLAQIGDQYADLFLAAKNLSDAILLSDILRVNTEITKAPLSASMIKRYDEHHQDLTLLKALVRQQLPEKYKEIFFDQSKNGYAGYIDGGASQEEFYKFIKPILEKMDGTEELLVKLNREDLLRKQRTFDNGSIPHQIHLGELHAILRRQEDFYPFLKDNREKIEKILTFRIPYYVGPLARGNSRFAWMTRKSEETITPWNFEEVVDKGASAQSFIERMTNFDKNLPNEKVLPKHSLLYEYFTVYNELTKVKYVTEGMRKPAFLSGEQKKAIVDLLFKTNRKVTVKQLKEDYFKKIECFDSVEISGVEDRFNASLGTYHDLLKIIKDKDFLDNEENEDILEDIVLTLTLFEDREMIEERLKTYAHLFDDKVMKQLKRRRYTGWGRLSRKLINGIRDKQSGKTILDFLKSDGFANRNFMQLIHDDSLTFKEDIQKAQVSGQGDSLHEHIANLAGSPAIKKGILQTVKVVDELVKVMGRHKPENIVIEMARENQTTQKGQKNSRERMKRIEEGIKELGSQILKEHPVENTQLQNEKLYLYYLQNGRDMYVDQELDINRLSDYDVDHIVPQSFLKDDSIDNKVLTRSDKARGKSDNVPSEEVVKKMKNYWRQLLNAKLITQRKFDNLTKAERGGLSELDKAGFIKRQLVETRQITKHVAQILDSRMNTKYDENDKLIREVKVITLKSKLVSDFRKDFQFYKVREINNYHHAHDAYLNAVVGTALIKKYPKLESEFVYGDYKVYDVRKMIAKSEQEIGKATAKYFFYSNIMNFFKTEITLANGEIRKRPLIETNGETGEIVWDKGRDFATVRKVLSMPQVNIVKKTEVQTGGFSKESILPKRNSDKLIARKKDWDPKKYGGFDSPTVAYSVLVVAKVEKGKSKKLKSVKELLGITIMERSSFEKNPIDFLEAKGYKEVKKDLIIKLPKYSLFELENGRKRMLASAGELQKGNELALPSKYVNFLYLASHYEKLKGSPEDNEQKQLFVEQHKHYLDEIIEQISEFSKRVILADANLDKVLSAYNKHRDKPIREQAENIIHLFTLTNLGAPAAFKYFDTTIDRKRYTSTKEVLDATLIHQSITGLYETRIDLSQLGGDGGGSSPAPGGGGGTLNIEDEHRLHETSKEPDVSLGSTWLSDFPQAWAETGGMGLAVRQAPLIIPLKATSTPVSIKQYPMSQEARLGIKPHIQRLLDQGILVPCQSPWNTPLLPVKKPGTNDYRPVQDLREVNKRVEDIHPTVPNPYNLLSGLPPSHQWYTVLDLKDAFFCLRLHPTSQPLFAFEWRDPEMGISGQLTWTRLPQGFKNSPTLFDEALHRDLADFRIQHPDLILLQYVDDLLLAATSELDCQQGTRALLQTLGNLGYRASAKKAQICQKQVKYLGYLLKEGQRWLTEARKETVMGQPTPKTPRQLREFLGTAGFCRLWIPGFAEMAAPLYPLTKTGTLFNWGPDQQKAYQEIKQALLTAPALGLPDLTKPFELFVDEKQGYAKGVLTQKLGPWRRPVAYLSKKLDPVAAGWPPCLRMVAAIAVLTKDAGKLTMGQPLVILAPHAVEALVKQPPDRWLSNARMTHYQALLLDTDRVQFGPVVALNPATLLPLPEEGLQHNCLDILAEAHGTRPDLTDQPLPDADHTWYTDGSSLLQEGQRKAGAAVTTETEVIWAKALPAGTSAQRAELIALTQALKMAEGKKLNVYTDSRYAFATAHIHGEIYRRRGLLTSEGKEIKNKDEILALLKALFLPKRLSIIHCPGHQKGHSAEARGNRMADQAARKAAITETPDTSTLLAGKRTADGSEFEKRTADGSEFESPKKKAKVE

SEQ ID NO: 7412 - protein, 2100 aa, synthetic construct
MPAAKRVKLDGGDKKYSIGLDIGTNSVGWAVITDEYKVPSKKFKVLGNTDRHSIKKNLIGALLFDSGETAEATRLKRTARRRYTRRKNRICYLQEIFSNEMAKVDDSFFHRLEESFLVEEDKKHERHPIFGNIVDEVAYHEKYPTIYHLRKKLVDSTDKADLRLIYLALAHMIKFRGHFLIEGDLNPDNSDVDKLFIQLVQTYNQLFEENPINASGVDAKAILSARLSKSRRLENLIAQLPGEKKNGLFGNLIALSLGLTPNFKSNFDLAEDAKLQLSKDTYDDDLDNLLAQIGDQYADLFLAAKNLSDAILLSDILRVNTEITKAPLSASMIKRYDEHHQDLTLLKALVRQQLPEKYKEIFFDQSKNGYAGYIDGGASQEEFYKFIKPILEKMDGTEELLVKLNREDLLRKQRTFDNGSIPHQIHLGELHAILRRQEDFYPFLKDNREKIEKILTFRIPYYVGPLARGNSRFAWMTRKSEETITPWNFEEVVDKGASAQSFIERMTNFDKNLPNEKVLPKHSLLYEYFTVYNELTKVKYVTEGMRKPAFLSGEQKKAIVDLLFKTNRKVTVKQLKEDYFKKIECFDSVEISGVEDRFNASLGTYHDLLKIIKDKDFLDNEENEDILEDIVLTLTLFEDREMIEERLKTYAHLFDDKVMKQLKRRRYTGWGRLSRKLINGIRDKQSGKTILDFLKSDGFANRNFMQLIHDDSLTFKEDIQKAQVSGQGDSLHEHIANLAGSPAIKKGILQTVKVVDELVKVMGRHKPENIVIEMARENQTTQKGQKNSRERMKRIEEGIKELGSQILKEHPVENTQLQNEKLYLYYLQNGRDMYVDQELDINRLSDYDVDHIVPQSFLKDDSIDNKVLTRSDKARGKSDNVPSEEVVKKMKNYWRQLLNAKLITQRKFDNLTKAERGGLSELDKAGFIKRQLVETRQITKHVAQILDSRMNTKYDENDKLIREVKVITLKSKLVSDFRKDFQFYKVREINNYHHAHDAYLNAVVGTALIKKYPKLESEFVYGDYKVYDVRKMIAKSEQEIGKATAKYFFYSNIMNFFKTEITLANGEIRKRPLIETNGETGEIVWDKGRDFATVRKVLSMPQVNIVKKTEVQTGGFSKESILPKRNSDKLIARKKDWDPKKYGGFDSPTVAYSVLVVAKVEKGKSKKLKSVKELLGITIMERSSFEKNPIDFLEAKGYKEVKKDLIIKLPKYSLFELENGRKRMLASAGELQKGNELALPSKYVNFLYLASHYEKLKGSPEDNEQKQLFVEQHKHYLDEIIEQISEFSKRVILADANLDKVLSAYNKHRDKPIREQAENIIHLFTLTNLGAPAAFKYFDTTIDRKRYTSTKEVLDATLIHQSITGLYETRIDLSQLGGDGGPAPGGGGSSGGTVSLQDEHRLFDIPVTTSLPDVWLQDFPQAWAETGGLGRAKCQAPIIIDLKPTAVPVSIKQYPMSLEAHMGIRQHIIKFLELGVLRPCRSPWNTPLLPVKKPGTQDYRPVQDLREINKRTVDIHPTVPNPYNLLSTLKPDYSWYTVLDLKDAFFCLPLAPQSQELFAFEWKDPERGISGQLTWTRLPQGFKNSPTLFNEALHRDLTDFRTQHPEVTLLQYVDDLLLAAPTKKACTQGTRHLLQELGEKGYRASAKKAQICQTKVTYLGYILSEGKRWLTPGRIETVARIPPPRNPREVREFLGTAGFCRLWIPGFAELAAPLYALTKPSTPFTWQTEHQLAFEALKKALLSAPALGLPDTSKPFTLFLDERQGIAKGVLTQKLGPWKRPVAYLSKKLDPVAAGWPPCLRIMAATAMLVKDSAKLTLGQPLTVITPHTLEAIVRQPPDRWITNARLTHYQALLLDTDRVQFGPPVTLNPATLLPVPENQPSPHDCRQVLAETHGTREDLKDQELPDADHTWYTDGSSYLDSGTRRAGAAVVDGHNTIWAQSLPPGTSAQKAELIALTKALELSKGKKANIYTDSRYAFATAHTHGSIYERRGWLTSEGKEIKNKAEIIALLKALFLPQEVAIIHCPGHQKGQDPVAVGNRQADRVARQAAMAEVLTLATEPDNTSHITAGKRTADGSEFEKRTADGSEFESPKKKAKVE

SEQ ID NO: 7413 - protein, 1999 aa, synthetic construct
MPAAKRVKLDGGDKKYSIGLDIGTNSVGWAVITDEYKVPSKKFKVLGNTDRHSIKKNLIGALLFDSGETAEATRLKRTARRRYTRRKNRICYLQEIFSNEMAKVDDSFFHRLEESFLVEEDKKHERHPIFGNIVDEVAYHEKYPTIYHLRKKLVDSTDKADLRLIYLALAHMIKFRGHFLIEGDLNPDNSDVDKLFIQLVQTYNQLFEENPINASGVDAKAILSARLSKSRRLENLIAQLPGEKKNGLFGNLIALSLGLTPNFKSNFDLAEDAKLQLSKDTYDDDLDNLLAQIGDQYADLFLAAKNLSDAILLSDILRVNTEITKAPLSASMIKRYDEHHQDLTLLKALVRQQLPEKYKEIFFDQSKNGYAGYIDGGASQEEFYKFIKPILEKMDGTEELLVKLNREDLLRKQRTFDNGSIPHQIHLGELHAILRRQEDFYPFLKDNREKIEKILTFRIPYYVGPLARGNSRFAWMTRKSEETITPWNFEEVVDKGASAQSFIERMTNFDKNLPNEKVLPKHSLLYEYFTVYNELTKVKYVTEGMRKPAFLSGEQKKAIVDLLFKTNRKVTVKQLKEDYFKKIECFDSVEISGVEDRFNASLGTYHDLLKIIKDKDFLDNEENEDILEDIVLTLTLFEDREMIEERLKTYAHLFDDKVMKQLKRRRYTGWGRLSRKLINGIRDKQSGKTILDFLKSDGFANRNFMQLIHDDSLTFKEDIQKAQVSGQGDSLHEHIANLAGSPAIKKGILQTVKVVDELVKVMGRHKPENIVIEMARENQTTQKGQKNSRERMKRIEEGIKELGSQILKEHPVENTQLQNEKLYLYYLQNGRDMYVDQELDINRLSDYDVDHIVPQSFLKDDSIDNKVLTRSDKARGKSDNVPSEEVVKKMKNYWRQLLNAKLITQRKFDNLTKAERGGLSELDKAGFIKRQLVETRQITKHVAQILDSRMNTKYDENDKLIREVKVITLKSKLVSDFRKDFQFYKVREINNYHHAHDAYLNAVVGTALIKKYPKLESEFVYGDYKVYDVRKMIAKSEQEIGKATAKYFFYSNIMNFFKTEITLANGEIRKRPLIETNGETGEIVWDKGRDFATVRKVLSMPQVNIVKKTEVQTGGFSKESILPKRNSDKLIARKKDWDPKKYGGFDSPTVAYSVLVVAKVEKGKSKKLKSVKELLGITIMERSSFEKNPIDFLEAKGYKEVKKDLIIKLPKYSLFELENGRKRMLASAGELQKGNELALPSKYVNFLYLASHYEKLKGSPEDNEQKQLFVEQHKHYLDEIIEQISEFSKRVILADANLDKVLSAYNKHRDKPIREQAENIIHLFTLTNLGAPAAFKYFDTTIDRKRYTSTKEVLDATLIHQSITGLYETRIDLSQLGGDGGPAPGGGGSSGGGVLDTPPSHIGLEHLPPPPEVPQFPLNLERLQALQDLVHRSLEAGYISPWDGPGNNPVFPVRKPNGAWRFVHDLRATNALTKPIPALSPGPPDLTAPPTHPPHIICLDLKDAFFQIPVEDRFRFYLSFTLPSPGGLQPHRRFAWRVLPQGFINSPALFQRALQEPLRQVSAAFSQSLLVSYMDDILYASPTEEQRSQCYQALAARLRDLGFQVASEKTSQTPSPVPFLGQMVHEQIVTYQSLPTLQISSPISLHQLQAVLGDLQWVSRGTPTTRRPLQLLYSSLKRHHDPRAIIQLSPEQLQGIAELRQALSHNARSRYNEQEPLLAYVHLTRAGSTLVLFQKGAQFPLAYFQTPLTDNQASPWGLLLLLGCQYLQTQALSSYAKPILKYYHNLPKTSLDNWIQSSEDPRVQELLQLWPQISSQGIQPPGPWKTLITRAEVFLTPQFSPDPIPAALCLFSDGATGRGAYCLWKDHLLDFQAVPAPESAQKGELAGLLAGLAAAPPEPVNIWVDSKYLYSLLRTWVLGAWLQPDPVPSYALLYKSLLRHPAIVVGHVRSHSSASHPIASLNNYVDQLAGKRTADGSEFEKRTADGSEFESPKKKAKVE

SEQ ID NO: 7414 - protein, 2171 aa, synthetic construct
MPAAKRVKLDGGDKKYSIGLDIGTNSVGWAVITDEYKVPSKKFKVLGNTDRHSIKKNLIGALLFDSGETAEATRLKRTARRRYTRRKNRICYLQEIFSNEMAKVDDSFFHRLEESFLVEEDKKHERHPIFGNIVDEVAYHEKYPTIYHLRKKLVDSTDKADLRLIYLALAHMIKFRGHFLIEGDLNPDNSDVDKLFIQLVQTYNQLFEENPINASGVDAKAILSARLSKSRRLENLIAQLPGEKKNGLFGNLIALSLGLTPNFKSNFDLAEDAKLQLSKDTYDDDLDNLLAQIGDQYADLFLAAKNLSDAILLSDILRVNTEITKAPLSASMIKRYDEHHQDLTLLKALVRQQLPEKYKEIFFDQSKNGYAGYIDGGASQEEFYKFIKPILEKMDGTEELLVKLNREDLLRKQRTFDNGSIPHQIHLGELHAILRRQEDFYPFLKDNREKIEKILTFRIPYYVGPLARGNSRFAWMTRKSEETITPWNFEEVVDKGASAQSFIERMTNFDKNLPNEKVLPKHSLLYEYFTVYNELTKVKYVTEGMRKPAFLSGEQKKAIVDLLFKTNRKVTVKQLKEDYFKKIECFDSVEISGVEDRFNASLGTYHDLLKIIKDKDFLDNEENEDILEDIVLTLTLFEDREMIEERLKTYAHLFDDKVMKQLKRRRYTGWGRLSRKLINGIRDKQSGKTILDFLKSDGFANRNFMQLIHDDSLTFKEDIQKAQVSGQGDSLHEHIANLAGSPAIKKGILQTVKVVDELVKVMGRHKPENIVIEMARENQTTQKGQKNSRERMKRIEEGIKELGSQILKEHPVENTQLQNEKLYLYYLQNGRDMYVDQELDINRLSDYDVDHIVPQSFLKDDSIDNKVLTRSDKARGKSDNVPSEEVVKKMKNYWRQLLNAKLITQRKFDNLTKAERGGLSELDKAGFIKRQLVETRQITKHVAQILDSRMNTKYDENDKLIREVKVITLKSKLVSDFRKDFQFYKVREINNYHHAHDAYLNAVVGTALIKKYPKLESEFVYGDYKVYDVRKMIAKSEQEIGKATAKYFFYSNIMNFFKTEITLANGEIRKRPLIETNGETGEIVWDKGRDFATVRKVLSMPQVNIVKKTEVQTGGFSKESILPKRNSDKLIARKKDWDPKKYGGFDSPTVAYSVLVVAKVEKGKSKKLKSVKELLGITIMERSSFEKNPIDFLEAKGYKEVKKDLIIKLPKYSLFELENGRKRMLASAGELQKGNELALPSKYVNFLYLASHYEKLKGSPEDNEQKQLFVEQHKHYLDEIIEQISEFSKRVILADANLDKVLSAYNKHRDKPIREQAENIIHLFTLTNLGAPAAFKYFDTTIDRKRYTSTKEVLDATLIHQSITGLYETRIDLSQLGGDGGPAPGGGGSSGGMDLLKPLTVERKGVKIKGYWNSQADITCVPKDLLQGEEPVRQQNVTTIHGTQEGDVYYVNLKIDGRRINTEVIGTTLDYAIITPGDVPWILKKPLELTIKLDLEEQQGTLLNNSILSKKGKEELKQLFEKYSALWQSWENQVGHRRIRPHKIATGTVKPTPQKQYHINPKAKPDIQIVINDLLKQGVLIQKESTMNTPVYPVPKPNGRWRMVLDYRAVNKVTPLIAVQNQHSYGILGSLFKGRYKTTIDLSNGFWAHPIVPEDYWITAFTWQGKQYCWTVLPQGFLNSPGLFTGDVVDLLQGIPNVEVYVDDVYISHDSEKEHLEYLDILFNRLKEAGYIISLKKSNIANSIVDFLGFQITNEGRGLTDTFKEKLENITAPTTLKQLQSILGLLNFARNFIPDFTELIAPLYALIPKSTKNYVPWQIEHSTTLETLITKLNGAEYLQGRKGDKTLIMKVNASYTTGYIRYYNEGEKKPISYVSIVFSKTELKFTELEKLLTTVHKGLLKALDLSMGQNIHVYSPIVSMQNIQKTPQTAKKALASRWLSWLSYLEDPRIRFFYDPQMPALKDLPAVDTGKDNKKHPSNFQHIFYTDGSAITSPTKEGHLNAGMGIVYFINKDGNLQKQQEWSISLGNHTAQFAEIAAFEFALKKCLPLGGNILVVTDSNYVAKAYNEELDVWASNGFVNNRKKPLKHISKWKSVADLKRLRPDVVVTHEPGHQKLDSSPHAYGNNLADQLATQASFKVHAGKRTADGSEFEKRTADGSEFESPKKKAKVE

SEQ ID NO: 7415 - protein, 2093 aa, synthetic construct
MPAAKRVKLDGGDKKYSIGLDIGTNSVGWAVITDEYKVPSKKFKVLGNTDRHSIKKNLIGALLFDSGETAEATRLKRTARRRYTRRKNRICYLQEIFSNEMAKVDDSFFHRLEESFLVEEDKKHERHPIFGNIVDEVAYHEKYPTIYHLRKKLVDSTDKADLRLIYLALAHMIKFRGHFLIEGDLNPDNSDVDKLFIQLVQTYNQLFEENPINASGVDAKAILSARLSKSRRLENLIAQLPGEKKNGLFGNLIALSLGLTPNFKSNFDLAEDAKLQLSKDTYDDDLDNLLAQIGDQYADLFLAAKNLSDAILLSDILRVNTEITKAPLSASMIKRYDEHHQDLTLLKALVRQQLPEKYKEIFFDQSKNGYAGYIDGGASQEEFYKFIKPILEKMDGTEELLVKLNREDLLRKQRTFDNGSIPHQIHLGELHAILRRQEDFYPFLKDNREKIEKILTFRIPYYVGPLARGNSRFAWMTRKSEETITPWNFEEVVDKGASAQSFIERMTNFDKNLPNEKVLPKHSLLYEYFTVYNELTKVKYVTEGMRKPAFLSGEQKKAIVDLLFKTNRKVTVKQLKEDYFKKIECFDSVEISGVEDRFNASLGTYHDLLKIIKDKDFLDNEENEDILEDIVLTLTLFEDREMIEERLKTYAHLFDDKVMKQLKRRRYTGWGRLSRKLINGIRDKQSGKTILDFLKSDGFANRNFMQLIHDDSLTFKEDIQKAQVSGQGDSLHEHIANLAGSPAIKKGILQTVKVVDELVKVMGRHKPENIVIEMARENQTTQKGQKNSRERMKRIEEGIKELGSQILKEHPVENTQLQNEKLYLYYLQNGRDMYVDQELDINRLSDYDVDHIVPQSFLKDDSIDNKVLTRSDKARGKSDNVPSEEVVKKMKNYWRQLLNAKLITQRKFDNLTKAERGGLSELDKAGFIKRQLVETRQITKHVAQILDSRMNTKYDENDKLIREVKVITLKSKLVSDFRKDFQFYKVREINNYHHAHDAYLNAVVGTALIKKYPKLESEFVYGDYKVYDVRKMIAKSEQEIGKATAKYFFYSNIMNFFKTEITLANGEIRKRPLIETNGETGEIVWDKGRDFATVRKVLSMPQVNIVKKTEVQTGGFSKESILPKRNSDKLIARKKDWDPKKYGGFDSPTVAYSVLVVAKVEKGKSKKLKSVKELLGITIMERSSFEKNPIDFLEAKGYKEVKKDLIIKLPKYSLFELENGRKRMLASAGELQKGNELALPSKYVNFLYLASHYEKLKGSPEDNEQKQLFVEQHKHYLDEIIEQISEFSKRVILADANLDKVLSAYNKHRDKPIREQAENIIHLFTLTNLGAPAAFKYFDTTIDRKRYTSTKEVLDATLIHQSITGLYETRIDLSQLGGDGGPAPGGGGSSGGTLQLEEEYRLFEPESTQKQEMDIWLKNFPQAWAETGGMGTAHCQAPVLIQLKATATPISIRQYPMPHEAYQGIKPHIRRMLDQGILKPCQSPWNTPLLPVKKPGTEDYRPVQDLREVNKRVEDIHPTVPNPYNLLSTLPPSHPWYTVLDLKDAFFCLRLHSESQLLFAFEWRDPEIGLSGQLTWTRLPQGFKNSPTLFNEALHSDLADFRVRYPALVLLQYVDDLLLAAATRTECLEGTKALLETLGNKGYRASAKKAQICLQEVTYLGYSLKDGQRWLTKARKEAILSIPVPKNSRQVREFLGTAGYCRLWIPGFAELAAPLYPLTRPGTLFQWGTEQQLAFEDIKKALLSSPALGLPDITKPFELFIDENSGFAKGVLVQKLGPWKRPVAYLSKKLDTVASGWPPCLRMVAAIAILVKDAGKLTLGQPLTILTSHPVEALVRQPPNKWLSNARMTHYQAMLLDAERVHFGPTVSLNPATLLPLPSGGNHHDCLQILAETHGTRPDLTDQPLPDADLTWYTDGSSFIRNGEREAGAAVTTESEVIWAAPLPPGTSAQRAELIALTQALKMAEGKKLTVYTDSRYAFATTHVHGEIYRRRGWLTSEGKEIKNKNEILALLEALFLPKRLSIIHCPGHQKGDSPQAKGNRLADDTAKKAATETHSSLTVLPAGKRTADGSEFEKRTADGSEFESPKKKAKVE

SEQ ID NO: 7416 - protein, 2216 aa, synthetic construct
MPAAKRVKLDGGDKKYSIGLDIGTNSVGWAVITDEYKVPSKKFKVLGNTDRHSIKKNLIGALLFDSGETAEATRLKRTARRRYTRRKNRICYLQEIFSNEMAKVDDSFFHRLEESFLVEEDKKHERHPIFGNIVDEVAYHEKYPTIYHLRKKLVDSTDKADLRLIYLALAHMIKFRGHFLIEGDLNPDNSDVDKLFIQLVQTYNQLFEENPINASGVDAKAILSARLSKSRRLENLIAQLPGEKKNGLFGNLIALSLGLTPNFKSNFDLAEDAKLQLSKDTYDDDLDNLLAQIGDQYADLFLAAKNLSDAILLSDILRVNTEITKAPLSASMIKRYDEHHQDLTLLKALVRQQLPEKYKEIFFDQSKNGYAGYIDGGASQEEFYKFIKPILEKMDGTEELLVKLNREDLLRKQRTFDNGSIPHQIHLGELHAILRRQEDFYPFLKDNREKIEKILTFRIPYYVGPLARGNSRFAWMTRKSEETITPWNFEEVVDKGASAQSFIERMTNFDKNLPNEKVLPKHSLLYEYFTVYNELTKVKYVTEGMRKPAFLSGEQKKAIVDLLFKTNRKVTVKQLKEDYFKKIECFDSVEISGVEDRFNASLGTYHDLLKIIKDKDFLDNEENEDILEDIVLTLTLFEDREMIEERLKTYAHLFDDKVMKQLKRRRYTGWGRLSRKLINGIRDKQSGKTILDFLKSDGFANRNFMQLIHDDSLTFKEDIQKAQVSGQGDSLHEHIANLAGSPAIKKGILQTVKVVDELVKVMGRHKPENIVIEMARENQTTQKGQKNSRERMKRIEEGIKELGSQILKEHPVENTQLQNEKLYLYYLQNGRDMYVDQELDINRLSDYDVDHIVPQSFLKDDSIDNKVLTRSDKARGKSDNVPSEEVVKKMKNYWRQLLNAKLITQRKFDNLTKAERGGLSELDKAGFIKRQLVETRQITKHVAQILDSRMNTKYDENDKLIREVKVITLKSKLVSDFRKDFQFYKVREINNYHHAHDAYLNAVVGTALIKKYPKLESEFVYGDYKVYDVRKMIAKSEQEIGKATAKYFFYSNIMNFFKTEITLANGEIRKRPLIETNGETGEIVWDKGRDFATVRKVLSMPQVNIVKKTEVQTGGFSKESILPKRNSDKLIARKKDWDPKKYGGFDSPTVAYSVLVVAKVEKGKSKKLKSVKELLGITIMERSSFEKNPIDFLEAKGYKEVKKDLIIKLPKYSLFELENGRKRMLASAGELQKGNELALPSKYVNFLYLASHYEKLKGSPEDNEQKQLFVEQHKHYLDEIIEQISEFSKRVILADANLDKVLSAYNKHRDKPIREQAENIIHLFTLTNLGAPAAFKYFDTTIDRKRYTSTKEVLDATLIHQSITGLYETRIDLSQLGGDGGPAPGGGGSSGGTLGDQGSRGSDPLPEPRVTLTVEGIPTEFLVNTGAEHSVLTKPMGKMGSKRTVVAGATGSKVYPWTTKRLLKIGQKQVTHSFLVIPECPAPLLGRDLLTKLKAQIQFSTEGPQVTWEDRPAMCLVLNLEEEYRLHEKPVPPSIDPSWLQLFPMVWAEKAGMGLANQVPPVVVELKSDASPVAVRQYPMSKEAREGIRPHIQRFLDLGILVPCQSPWNTPLLPVKKPGTNDYRPVQDLREVNKRVQDIHPTVPNPYNLLSSLPPSHTWYSVLDLKDAFFCLKLHPNSQPLFAFEWRDPEKGNTGQLTWTRLPQGFKNSPTLFDEALHRDLASFRALNPQVVMLQYVDDLLVAAPTYRDCKEGTRRLLQELSKLGYRVSAKKAQLCREEVTYLGYLLKGGKRWLTPARKATVMKIPTPTTPRQVREFLGTAGFCRLWIPGFASLAAPLYPLTREKVPFTWTEAHQEAFGRIKEALLSAPALALPDLTKPFALYVDEKEGVARGVLTQTLGPWRRPVAYLSKKLDPVASGWPTCLKAIAAVALLLKDADKLTLGQNVLVIAPHNLESIVRQPPDRWMTNARMTHYQSLLLNERVSFAPPAILNPATLLPVESDDTPIHICSEILAEETGTRPDLRDQPLPGVPAWYTDGSSFIMDGRRQAGAAIVDNKRTVWASNLPEGTSAQKAELIALTQALRLAEGKSINIYTDSRYAFATAHVHGAIYKQRGLLTSAGKDIKNKEEILALLEAIHLPKRVAIIHCPGHQRGTDPVATGNRKADEAAKQAAQSTRILTETTKNAGKRTADGSEFEKRTADGSEFESPKKKAKVE

SEQ ID NO: 7417 - protein, 2125 aa, synthetic construct
MPAAKRVKLDGGDKKYSIGLDIGTNSVGWAVITDEYKVPSKKFKVLGNTDRHSIKKNLIGALLFDSGETAEATRLKRTARRRYTRRKNRICYLQEIFSNEMAKVDDSFFHRLEESFLVEEDKKHERHPIFGNIVDEVAYHEKYPTIYHLRKKLVDSTDKADLRLIYLALAHMIKFRGHFLIEGDLNPDNSDVDKLFIQLVQTYNQLFEENPINASGVDAKAILSARLSKSRRLENLIAQLPGEKKNGLFGNLIALSLGLTPNFKSNFDLAEDAKLQLSKDTYDDDLDNLLAQIGDQYADLFLAAKNLSDAILLSDILRVNTEITKAPLSASMIKRYDEHHQDLTLLKALVRQQLPEKYKEIFFDQSKNGYAGYIDGGASQEEFYKFIKPILEKMDGTEELLVKLNREDLLRKQRTFDNGSIPHQIHLGELHAILRRQEDFYPFLKDNREKIEKILTFRIPYYVGPLARGNSRFAWMTRKSEETITPWNFEEVVDKGASAQSFIERMTNFDKNLPNEKVLPKHSLLYEYFTVYNELTKVKYVTEGMRKPAFLSGEQKKAIVDLLFKTNRKVTVKQLKEDYFKKIECFDSVEISGVEDRFNASLGTYHDLLKIIKDKDFLDNEENEDILEDIVLTLTLFEDREMIEERLKTYAHLFDDKVMKQLKRRRYTGWGRLSRKLINGIRDKQSGKTILDFLKSDGFANRNFMQLIHDDSLTFKEDIQKAQVSGQGDSLHEHIANLAGSPAIKKGILQTVKVVDELVKVMGRHKPENIVIEMARENQTTQKGQKNSRERMKRIEEGIKELGSQILKEHPVENTQLQNEKLYLYYLQNGRDMYVDQELDINRLSDYDVDHIVPQSFLKDDSIDNKVLTRSDKARGKSDNVPSEEVVKKMKNYWRQLLNAKLITQRKFDNLTKAERGGLSELDKAGFIKRQLVETRQITKHVAQILDSRMNTKYDENDKLIREVKVITLKSKLVSDFRKDFQFYKVREINNYHHAHDAYLNAVVGTALIKKYPKLESEFVYGDYKVYDVRKMIAKSEQEIGKATAKYFFYSNIMNFFKTEITLANGEIRKRPLIETNGETGEIVWDKGRDFATVRKVLSMPQVNIVKKTEVQTGGFSKESILPKRNSDKLIARKKDWDPKKYGGFDSPTVAYSVLVVAKVEKGKSKKLKSVKELLGITIMERSSFEKNPIDFLEAKGYKEVKKDLIIKLPKYSLFELENGRKRMLASAGELQKGNELALPSKYVNFLYLASHYEKLKGSPEDNEQKQLFVEQHKHYLDEIIEQISEFSKRVILADANLDKVLSAYNKHRDKPIREQAENIIHLFTLTNLGAPAAFKYFDTTIDRKRYTSTKEVLDATLIHQSITGLYETRIDLSQLGGDGGPAPGGGGSSGGLLGRDLLTKLKAQIQFSTEGPQVTWEDRPAMCLVLNLEEEYRLHEKPVPPSIDPSWLQLFPMVWAEKAGMGLANQVPPVVVELKSDASPVAVRQYPMSKEAREGIRPHIQRFLDLGILVPCQSPWNTPLLPVKKPGTNDYRPVQDLREVNKRVQDIHPTVPNPYNLLSSLPPSHTWYSVLDLKDAFFCLKLHPNSQPLFAFEWRDPEKGNTGQLTWTRLPQGFKNSPTLFNEALHRDLASFRALNPQVVMLQYVDDLLVAAPTYRDCKEGTRRLLQELSKLGYRVSAKKAQLCREEVTYLGYLLKGGKRWLTPARKATVMKIPTPTTPRQVREFLGTAGFCRLWIPGFASLAAPLYPLTRPKVPFTWTEAHQEAFGRIKEALLSAPALALPDLTKPFALYVDEKEGVARGVLTQTLGPWRRPVAYLSKKLDPVASGWPTCLKAIAAVALLLKDADKLTLGQNVLVIAPHNLESIVRQPPDRWMTNARMTHYQSLLLNERVSFAPPAILNPATLLPVESDDTPIHICSEILAEETGTRPDLRDQPLPGVPAWYTDGSSFIMDGRRQAGAAIVDNKRTVWASNLPEGTSAQKAELIALTQALRLAEGKSINIYTDSRYAFATAHVHGAIYKQRGWLTSAGKDIKNKEEILALLEAIHLPKRVAIIHCPGHQRGTDPVATGNRKADEAAKQAAQSTRILTETTKNAGKRTADGSEFEKRTADGSEFESPKKKAKVE

SEQ ID NO: 7418 - protein, 2216 aa, synthetic construct
MPAAKRVKLDGGDKKYSIGLDIGTNSVGWAVITDEYKVPSKKFKVLGNTDRHSIKKNLIGALLFDSGETAEATRLKRTARRRYTRRKNRICYLQEIFSNEMAKVDDSFFHRLEESFLVEEDKKHERHPIFGNIVDEVAYHEKYPTIYHLRKKLVDSTDKADLRLIYLALAHMIKFRGHFLIEGDLNPDNSDVDKLFIQLVQTYNQLFEENPINASGVDAKAILSARLSKSRRLENLIAQLPGEKKNGLFGNLIALSLGLTPNFKSNFDLAEDAKLQLSKDTYDDDLDNLLAQIGDQYADLFLAAKNLSDAILLSDILRVNTEITKAPLSASMIKRYDEHHQDLTLLKALVRQQLPEKYKEIFFDQSKNGYAGYIDGGASQEEFYKFIKPILEKMDGTEELLVKLNREDLLRKQRTFDNGSIPHQIHLGELHAILRRQEDFYPFLKDNREKIEKILTFRIPYYVGPLARGNSRFAWMTRKSEETITPWNFEEVVDKGASAQSFIERMTNFDKNLPNEKVLPKHSLLYEYFTVYNELTKVKYVTEGMRKPAFLSGEQKKAIVDLLFKTNRKVTVKQLKEDYFKKIECFDSVEISGVEDRFNASLGTYHDLLKIIKDKDFLDNEENEDILEDIVLTLTLFEDREMIEERLKTYAHLFDDKVMKQLKRRRYTGWGRLSRKLINGIRDKQSGKTILDFLKSDGFANRNFMQLIHDDSLTFKEDIQKAQVSGQGDSLHEHIANLAGSPAIKKGILQTVKVVDELVKVMGRHKPENIVIEMARENQTTQKGQKNSRERMKRIEEGIKELGSQILKEHPVENTQLQNEKLYLYYLQNGRDMYVDQELDINRLSDYDVDHIVPQSFLKDDSIDNKVLTRSDKARGKSDNVPSEEVVKKMKNYWRQLLNAKLITQRKFDNLTKAERGGLSELDKAGFIKRQLVETRQITKHVAQILDSRMNTKYDENDKLIREVKVITLKSKLVSDFRKDFQFYKVREINNYHHAHDAYLNAVVGTALIKKYPKLESEFVYGDYKVYDVRKMIAKSEQEIGKATAKYFFYSNIMNFFKTEITLANGEIRKRPLIETNGETGEIVWDKGRDFATVRKVLSMPQVNIVKKTEVQTGGFSKESILPKRNSDKLIARKKDWDPKKYGGFDSPTVAYSVLVVAKVEKGKSKKLKSVKELLGITIMERSSFEKNPIDFLEAKGYKEVKKDLIIKLPKYSLFELENGRKRMLASAGELQKGNELALPSKYVNFLYLASHYEKLKGSPEDNEQKQLFVEQHKHYLDEIIEQISEFSKRVILADANLDKVLSAYNKHRDKPIREQAENIIHLFTLTNLGAPAAFKYFDTTIDRKRYTSTKEVLDATLIHQSITGLYETRIDLSQLGGDGGPAPGGGGSSGGTLGDQGSRGSDPLPEPRVTLTVEGIPTEFLVNTGAEHSVLTKPMGKMGSKRTVVAGATGSKVYPWTTKRLLKIGQKQVTHSFLVIPECPAPLLGRDLLTKLKAQIQFSTEGPQVTWEDRPAMCLVLNLEEEYRLHEKPVPPSIDPSWLQLFPMVWAEKAGMGLANQVPPVVVELKSDASPVAVRQYPMSKEAREGIRPHIQRFLDLGILVPCQSPWNTPLLPVKKPGTNDYRPVQDLREVNKRVQDIHPTVPNPYNLLSSLPPSHTWYSVLDLKDAFFCLKLHPNSQPLFAFEWRDPEKGNTGQLTWTRLPQGFKNSPTLFNEALHRDLASFRALNPQVVMLQYVDDLLVAAPTYRDCKEGTRRLLQELSKLGYRVSAKKAQLCREEVTYLGYLLKGGKRWLTPARKATVMKIPTPTTPRQVREFLGTAGFCRLWIPGFASLAAPLYPLTRPKVPFTWTEAHQEAFGRIKEALLSAPALALPDLTKPFALYVDEKEGVARGVLTQTLGPWRRPVAYLSKKLDPVASGWPTCLKAIAAVALLLKDADKLTLGQNVLVIAPHNLESIVRQPPDRWMTNARMTHYQSLLLNERVSFAPPAILNPATLLPVESDDTPIHICSEILAEETGTRPDLRDQPLPGVPAWYTDGSSFIMDGRRQAGAAIVDNKRTVWASNLPEGTSAQKAELIALTQALRLAEGKSINIYTDSRYAFATAHVHGAIYKQRGWLTSAGKDIKNKEEILALLEAIHLPKRVAIIHCPGHQRGTDPVATGNRKADEAAKQAAQSTRILTETTKNAGKRTADGSEFEKRTADGSEFESPKKKAKVE

SEQ ID NO: 7419 - protein, 2094 aa, synthetic construct
MPAAKRVKLDGGDKKYSIGLDIGTNSVGWAVITDEYKVPSKKFKVLGNTDRHSIKKNLIGALLFDSGETAEATRLKRTARRRYTRRKNRICYLQEIFSNEMAKVDDSFFHRLEESFLVEEDKKHERHPIFGNIVDEVAYHEKYPTIYHLRKKLVDSTDKADLRLIYLALAHMIKFRGHFLIEGDLNPDNSDVDKLFIQLVQTYNQLFEENPINASGVDAKAILSARLSKSRRLENLIAQLPGEKKNGLFGNLIALSLGLTPNFKSNFDLAEDAKLQLSKDTYDDDLDNLLAQIGDQYADLFLAAKNLSDAILLSDILRVNTEITKAPLSASMIKRYDEHHQDLTLLKALVRQQLPEKYKEIFFDQSKNGYAGYIDGGASQEEFYKFIKPILEKMDGTEELLVKLNREDLLRKQRTFDNGSIPHQIHLGELHAILRRQEDFYPFLKDNREKIEKILTFRIPYYVGPLARGNSRFAWMTRKSEETITPWNFEEVVDKGASAQSFIERMTNFDKNLPNEKVLPKHSLLYEYFTVYNELTKVKYVTEGMRKPAFLSGEQKKAIVDLLFKTNRKVTVKQLKEDYFKKIECFDSVEISGVEDRFNASLGTYHDLLKIIKDKDFLDNEENEDILEDIVLTLTLFEDREMIEERLKTYAHLFDDKVMKQLKRRRYTGWGRLSRKLINGIRDKQSGKTILDFLKSDGFANRNFMQLIHDDSLTFKEDIQKAQVSGQGDSLHEHIANLAGSPAIKKGILQTVKVVDELVKVMGRHKPENIVIEMARENQTTQKGQKNSRERMKRIEEGIKELGSQILKEHPVENTQLQNEKLYLYYLQNGRDMYVDQELDINRLSDYDVDHIVPQSFLKDDSIDNKVLTRSDKARGKSDNVPSEEVVKKMKNYWRQLLNAKLITQRKFDNLTKAERGGLSELDKAGFIKRQLVETRQITKHVAQILDSRMNTKYDENDKLIREVKVITLKSKLVSDFRKDFQFYKVREINNYHHAHDAYLNAVVGTALIKKYPKLESEFVYGDYKVYDVRKMIAKSEQEIGKATAKYFFYSNIMNFFKTEITLANGEIRKRPLIETNGETGEIVWDKGRDFATVRKVLSMPQVNIVKKTEVQTGGFSKESILPKRNSDKLIARKKDWDPKKYGGFDSPTVAYSVLVVAKVEKGKSKKLKSVKELLGITIMERSSFEKNPIDFLEAKGYKEVKKDLIIKLPKYSLFELENGRKRMLASAGELQKGNELALPSKYVNFLYLASHYEKLKGSPEDNEQKQLFVEQHKHYLDEIIEQISEFSKRVILADANLDKVLSAYNKHRDKPIREQAENIIHLFTLTNLGAPAAFKYFDTTIDRKRYTSTKEVLDATLIHQSITGLYETRIDLSQLGGDGGPAPGGGGSSGGTLNLEDEYRLYETSAEPEVSPGSTWLSDFPQAWAETGGMGLAVRQAPLIIPLKATSTPVSIKQYPMSQEAKLGIKPHIQRLLDQGILVPCQSPWNTPLLPVKKPGTNDYRPVQDLREVNKRVEDIHPTVPNPYNLLSGLPPSHRWYTVLDLKDAFFCLRLHPTSQPLFAFEWRDPGMGISGQLTWTRLPQGFKNSPTLFNEALHRDLADFRIQHPDLILLQYVDDILLAATSELDCQQGTRALLLTLGNLGYRASAKKAQLCQKQVKYLGYLLKEGQRWLTEARKETVMGQPTPKTPRQLREFLGTAGFCRLWIPGFAEMAAPLYPLTKPGTLFNWGPDQQKAYQEIKQALLTAPALGLPDLTKPFELFVDEKQGYAKGVLTQKLGPWRRPVAYLSKKLDPVAAGWPPCLRMVAAIAVLRKDAGKLTMGQPLVILAPHAVEALVKQPPDRWLSNARMTHYQAMLLDTDRVQFGPVVALNPATLLPLPEEGAPHDCLEILAETHGTRPDLTDQPIPDADHTWYTDGSSFLQEGQRKAGAAVTTETEVIWARALPAGTSAQRAELIALTQALKMAEGKRLNVYTDSRYAFATAHIHGEIYRRRGWLTSEGREIKNKSEILALLKALFLPKRLSIIHCLGHQKGDSAEARGNRLADQAAREAAIKTPPDTSTLLAGKRTADGSEFEKRTADGSEFESPKKKAKVE

SEQ ID NO: 7420 - protein, 2094 aa, synthetic construct
MPAAKRVKLDGGDKKYSIGLDIGTNSVGWAVITDEYKVPSKKFKVLGNTDRHSIKKNLIGALLFDSGETAEATRLKRTARRRYTRRKNRICYLQEIFSNEMAKVDDSFFHRLEESFLVEEDKKHERHPIFGNIVDEVAYHEKYPTIYHLRKKLVDSTDKADLRLIYLALAHMIKFRGHFLIEGDLNPDNSDVDKLFIQLVQTYNQLFEENPINASGVDAKAILSARLSKSRRLENLIAQLPGEKKNGLFGNLIALSLGLTPNFKSNFDLAEDAKLQLSKDTYDDDLDNLLAQIGDQYADLFLAAKNLSDAILLSDILRVNTEITKAPLSASMIKRYDEHHQDLTLLKALVRQQLPEKYKEIFFDQSKNGYAGYIDGGASQEEFYKFIKPILEKMDGTEELLVKLNREDLLRKQRTFDNGSIPHQIHLGELHAILRRQEDFYPFLKDNREKIEKILTFRIPYYVGPLARGNSRFAWMTRKSEETITPWNFEEVVDKGASAQSFIERMTNFDKNLPNEKVLPKHSLLYEYFTVYNELTKVKYVTEGMRKPAFLSGEQKKAIVDLLFKTNRKVTVKQLKEDYFKKIECFDSVEISGVEDRFNASLGTYHDLLKIIKDKDFLDNEENEDILEDIVLTLTLFEDREMIEERLKTYAHLFDDKVMKQLKRRRYTGWGRLSRKLINGIRDKQSGKTILDFLKSDGFANRNFMQLIHDDSLTFKEDIQKAQVSGQGDSLHEHIANLAGSPAIKKGILQTVKVVDELVKVMGRHKPENIVIEMARENQTTQKGQKNSRERMKRIEEGIKELGSQILKEHPVENTQLQNEKLYLYYLQNGRDMYVDQELDINRLSDYDVDHIVPQSFLKDDSIDNKVLTRSDKARGKSDNVPSEEVVKKMKNYWRQLLNAKLITQRKFDNLTKAERGGLSELDKAGFIKRQLVETRQITKHVAQILDSRMNTKYDENDKLIREVKVITLKSKLVSDFRKDFQFYKVREINNYHHAHDAYLNAVVGTALIKKYPKLESEFVYGDYKVYDVRKMIAKSEQEIGKATAKYFFYSNIMNFFKTEITLANGEIRKRPLIETNGETGEIVWDKGRDFATVRKVLSMPQVNIVKKTEVQTGGFSKESILPKRNSDKLIARKKDWDPKKYGGFDSPTVAYSVLVVAKVEKGKSKKLKSVKELLGITIMERSSFEKNPIDFLEAKGYKEVKKDLIIKLPKYSLFELENGRKRMLASAGELQKGNELALPSKYVNFLYLASHYEKLKGSPEDNEQKQLFVEQHKHYLDEIIEQISEFSKRVILADANLDKVLSAYNKHRDKPIREQAENIIHLFTLTNLGAPAAFKYFDTTIDRKRYTSTKEVLDATLIHQSITGLYETRIDLSQLGGDGGPAPGGGGSSGGTLGIEDEYRLHETSTEPDVSLGSTWLSDFPQAWAETGGMGLAVRQAPLIIPLKATSTPVSIQQYPMSHEARLGIKPHIQRLLDQGILVPCQSPWNTPLLPVKKPGTNDYRPVQDLREVNKRVEDIHPTVPNPYNLLSGLPPSHQWYTVLDLKDAFFCLRLHPTSQPLFAFEWRDPGMGISGQLTWTRLPQGFKNSPTLFDEALHRDLADFRIQHPDLILLQYVDDILLAATSELDCQQGTRALLQTLGDLGYRASAKKAQICQKQVKYLGYLLREGQRWLTEARKETVMGQPVPKTPRQLREFLGTAGFCRLWIPGFAEMAAPLYPLTKTGTLFSWGPDQQKAYQEIKQALLTAPALGLPDLTKPFELFVDEKQGYAKGVLTQKLGPWRRPVAYLSKKLDPVAAGWPPCLRMVAAIAVLTKDAGKLTMGQPLVILAPHAVEALVKQPPDRWLSNARMTHYQAMLLDTDRVQFGPVVALNPATLLPLPEEGAPHDCLEILAETHGTRPDLTDQPIPDADHTWYTDGSSFLQEGQRKAGAAVTTETEVIWAGALPAGTSAQRAELIALTQALKMAEGKRLNVYTDSRYAFATAHIHGEIYRRRGLLTSEGREIKNKSEILALLKALFLPKRLSIIHCLGHQKGDSAEARGNRLADQAAREAAIKTPPDTSTLLAGKRTADGSEFEKRTADGSEFESPKKKAKVE

SEQ ID NO: 7421 - protein, 2094 aa, synthetic construct
MPAAKRVKLDGGDKKYSIGLDIGTNSVGWAVITDEYKVPSKKFKVLGNTDRHSIKKNLIGALLFDSGETAEATRLKRTARRRYTRRKNRICYLQEIFSNEMAKVDDSFFHRLEESFLVEEDKKHERHPIFGNIVDEVAYHEKYPTIYHLRKKLVDSTDKADLRLIYLALAHMIKFRGHFLIEGDLNPDNSDVDKLFIQLVQTYNQLFEENPINASGVDAKAILSARLSKSRRLENLIAQLPGEKKNGLFGNLIALSLGLTPNFKSNFDLAEDAKLQLSKDTYDDDLDNLLAQIGDQYADLFLAAKNLSDAILLSDILRVNTEITKAPLSASMIKRYDEHHQDLTLLKALVRQQLPEKYKEIFFDQSKNGYAGYIDGGASQEEFYKFIKPILEKMDGTEELLVKLNREDLLRKQRTFDNGSIPHQIHLGELHAILRRQEDFYPFLKDNREKIEKILTFRIPYYVGPLARGNSRFAWMTRKSEETITPWNFEEVVDKGASAQSFIERMTNFDKNLPNEKVLPKHSLLYEYFTVYNELTKVKYVTEGMRKPAFLSGEQKKAIVDLLFKTNRKVTVKQLKEDYFKKIECFDSVEISGVEDRFNASLGTYHDLLKIIKDKDFLDNEENEDILEDIVLTLTLFEDREMIEERLKTYAHLFDDKVMKQLKRRRYTGWGRLSRKLINGIRDKQSGKTILDFLKSDGFANRNFMQLIHDDSLTFKEDIQKAQVSGQGDSLHEHIANLAGSPAIKKGILQTVKVVDELVKVMGRHKPENIVIEMARENQTTQKGQKNSRERMKRIEEGIKELGSQILKEHPVENTQLQNEKLYLYYLQNGRDMYVDQELDINRLSDYDVDHIVPQSFLKDDSIDNKVLTRSDKARGKSDNVPSEEVVKKMKNYWRQLLNAKLITQRKFDNLTKAERGGLSELDKAGFIKRQLVETRQITKHVAQILDSRMNTKYDENDKLIREVKVITLKSKLVSDFRKDFQFYKVREINNYHHAHDAYLNAVVGTALIKKYPKLESEFVYGDYKVYDVRKMIAKSEQEIGKATAKYFFYSNIMNFFKTEITLANGEIRKRPLIETNGETGEIVWDKGRDFATVRKVLSMPQVNIVKKTEVQTGGFSKESILPKRNSDKLIARKKDWDPKKYGGFDSPTVAYSVLVVAKVEKGKSKKLKSVKELLGITIMERSSFEKNPIDFLEAKGYKEVKKDLIIKLPKYSLFELENGRKRMLASAGELQKGNELALPSKYVNFLYLASHYEKLKGSPEDNEQKQLFVEQHKHYLDEIIEQISEFSKRVILADANLDKVLSAYNKHRDKPIREQAENIIHLFTLTNLGAPAAFKYFDTTIDRKRYTSTKEVLDATLIHQSITGLYETRIDLSQLGGDGGPAPGGGGSSGGTLGIEDEYRLHETSTEPDVSLGSTWLSDFPQAWAETGGMGLAVRQAPLIIPLKATSTPVSIQQYPMSHEARLGIKPHIQRLLDQGILVPCQSPWNTPLLPVKKPGTNDYRPVQDLREVNKRVEDIHPTVPNPYNLLSGLPPSHQWYTVLDLKDAFFCLRLHPTSQPLFAFEWRDPGMGISGQLTWTRLPQGFKNSPTLFNEALHRDLADFRIQHPDLILLQYVDDILLAATSELDCQQGTRALLQTLGDLGYRASAKKAQICQKQVKYLGYLLREGQRWLTEARKETVMGQPVPKTPRQLREFLGTAGFCRLWIPGFAEMAAPLYPLTKPGTLFSWGPDQQKAYQEIKQALLTAPALGLPDLTKPFELFVDEKQGYAKGVLTQKLGPWRRPVAYLSKKLDPVAAGWPPCLRMVAAIAVLTKDAGKLTMGQPLVILAPHAVEALVKQPPDRWLSNARMTHYQAMLLDTDRVQFGPVVALNPATLLPLPEEGAPHDCLEILAETHGTRPDLTDQPIPDADHTWYTDGSSFLQEGQRKAGAAVTTETEVIWAGALPAGTSAQRAELIALTQALKMAEGKRLNVYTDSRYAFATAHIHGEIYRRRGWLTSEGREIKNKSEILALLKALFLPKRLSIIHCLGHQKGDSAEARGNRLADQAAREAAIKTPPDTSTLLAGKRTADGSEFEKRTADGSEFESPKKKAKVE

SEQ ID NO: 7422 - protein, 2094 aa, synthetic construct; identical to SEQ ID NO: 7421

SEQ ID NO: 7423 - protein, 2094 aa, synthetic construct
MPAAKRVKLDGGDKKYSIGLDIGTNSVGWAVITDEYKVPSKKFKVLGNTDRHSIKKNLIGALLFDSGETAEATRLKRTARRRYTRRKNRICYLQEIFSNEMAKVDDSFFHRLEESFLVEEDKKHERHPIFGNIVDEVAYHEKYPTIYHLRKKLVDSTDKADLRLIYLALAHMIKFRGHFLIEGDLNPDNSDVDKLFIQLVQTYNQLFEENPINASGVDAKAILSARLSKSRRLENLIAQLPGEKKNGLFGNLIALSLGLTPNFKSNFDLAEDAKLQLSKDTYDDDLDNLLAQIGDQYADLFLAAKNLSDAILLSDILRVNTEITKAPLSASMIKRYDEHHQDLTLLKALVRQQLPEKYKEIFFDQSKNGYAGYIDGGASQEEFYKFIKPILEKMDGTEELLVKLNREDLLRKQRTFDNGSIPHQIHLGELHAILRRQEDFYPFLKDNREKIEKILTFRIPYYVGPLARGNSRFAWMTRKSEETITPWNFEEVVDKGASAQSFIERMTNFDKNLPNEKVLPKHSLLYEYFTVYNELTKVKYVTEGMRKPAFLSGEQKKAIVDLLFKTNRKVTVKQLKEDYFKKIECFDSVEISGVEDRFNASLGTYHDLLKIIKDKDFLDNEENEDILEDIVLTLTLFEDREMIEERLKTYAHLFDDKVMKQLKRRRYTGWGRLSRKLINGIRDKQSGKTILDFLKSDGFANRNFMQLIHDDSLTFKEDIQKAQVSGQGDSLHEHIANLAGSPAIKKGILQTVKVVDELVKVMGRHKPENIVIEMARENQTTQKGQKNSRERMKRIEEGIKELGSQILKEHPVENTQLQNEKLYLYYLQNGRDMYVDQELDINRLSDYDVDHIVPQSFLKDDSIDNKVLTRSDKARGKSDNVPSEEVVKKMKNYWRQLLNAKLITQRKFDNLTKAERGGLSELDKAGFIKRQLVETRQITKHVAQILDSRMNTKYDENDKLIREVKVITLKSKLVSDFRKDFQFYKVREINNYHHAHDAYLNAVVGTALIKKYPKLESEFVYGDYKVYDVRKMIAKSEQEIGKATAKYFFYSNIMNFFKTEITLANGEIRKRPLIETNGETGEIVWDKGRDFATVRKVLSMPQVNIVKKTEVQTGGFSKESILPKRNSDKLIARKKDWDPKKYGGFDSPTVAYSVLVVAKVEKGKSKKLKSVKELLGITIMERSSFEKNPIDFLEAKGYKEVKKDLIIKLPKYSLFELENGRKRMLASAGELQKGNELALPSKYVNFLYLASHYEKLKGSPEDNEQKQLFVEQHKHYLDEIIEQISEFSKRVILADANLDKVLSAYNKHRDKPIREQAENIIHLFTLTNLGAPAAFKYFDTTIDRKRYTSTKEVLDATLIHQSITGLYETRIDLSQLGGDGGPAPGGGGSSGGTLNIEDEYRLHETSKEPDVSLGSTWLSDFPQAWAETGGMGLAVRQAPLIIPLKATSTPVSIKQYPMSQEARLGIKPHIQRLLDQGILVPCQSPWNTPLLPVKKPGTNDYRPVQDLREVNKRVEDIHPTVPNPYNLLSGLPPSHQWYTVLDLKDAFFCLRLHPTSQPLFAFEWRDPEMGISGQLTWTRLPQGFKNSPTLFDEALHRDLAGFRIQHPDLILLQYVDDLLLAATSELDCQQGTRALLQTLGDLGYRASAKKAQICQKQVKYLGYLLKEGQRWLTEARKETVMGQPIPKTPRQLREFLGTAGFCRLWIPGFAEMAAPLYPLTKTGTLFNWGPDQQKAFQEIKQALLTAPALGLPDLTKPFELFVDEKQGYAKGVLTQKLGPWRRPVAYLSKKLDPVAAGWPPCLRMVAAIAVLTKDAGKLTMGQPLVILAPHAVEALVKQPPDRWLSNARMTHYQALLLDTDRVQFGPVVALNPATLLPLPEEGLQHDCLDILAEAHGTRSDLMDQPLPDADHTWYTDGSSFLQEGQRKAGAAVTTETEVIWARALPAGTSAQRAELIALTQALKMAEGKKLNVYTDSRYAFATAHIHGEIYRRRGLLTSEGKEIKNKDEILALLKALFLPKRLSIIHCPGHQKGNSAEARGNRMADQAAREVATRETPETSTLLAGKRTADGSEFEKRTADGSEFESPKKKAKVE

SEQ ID NO: 7424 - protein, 2094 aa, synthetic construct
MPAAKRVKLDGGDKKYSIGLDIGTNSVGWAVITDEYKVPSKKFKVLGNTDRHSIKKNLIGALLFDSGETAEATRLKRTARRRYTRRKNRICYLQEIFSNEMAKVDDSFFHRLEESFLVEEDKKHERHPIFGNIVDEVAYHEKYPTIYHLRKKLVDSTDKADLRLIYLALAHMIKFRGHFLIEGDLNPDNSDVDKLFIQLVQTYNQLFEENPINASGVDAKAILSARLSKSRRLENLIAQLPGEKKNGLFGNLIALSLGLTPNFKSNFDLAEDAKLQLSKDTYDDDLDNLLAQIGDQYADLFLAAKNLSDAILLSDILRVNTEITKAPLSASMIKRYDEHHQDLTLLKALVRQQLPEKYKEIFFDQSKNGYAGYIDGGASQEEFYKFIKPILEKMDGTEELLVKLNREDLLRKQRTFDNGSIPHQIHLGELHAILRRQEDFYPFLKDNREKIEKILTFRIPYYVGPLARGNSRFAWMTRKSEETITPWNFEEVVDKGASAQSFIERMTNFDKNLPNEKVLPKHSLLYEYFTVYNELTKVKYVTEGMRKPAFLSGEQKKAIVDLLFKTNRKVTVKQLKEDYFKKIECFDSVEISGVEDRFNASLGTYHDLLKIIKDKDFLDNEENEDILEDIVLTLTLFEDREMIEERLKTYAHLFDDKVMKQLKRRRYTGWGRLSRKLINGIRDKQSGKTILDFLKSDGFANRNFMQLIHDDSLTFKEDIQKAQVSGQGDSLHEHIANLAGSPAIKKGILQTVKVVDELVKVMGRHKPENIVIEMARENQTTQKGQKNSRERMKRIEEGIKELGSQILKEHPVENTQLQNEKLYLYYLQNGRDMYVDQELDINRLSDYDVDHIVPQSFLKDDSIDNKVLTRSDKARGKSDNVPSEEVVKKMKNYWRQLLNAKLITQRKFDNLTKAERGGLSELDKAGFIKRQLVETRQITKHVAQILDSRMNTKYDENDKLIREVKVITLKSKLVSDFRKDFQFYKVREINNYHHAHDAYLNAVVGTALIKKYPKLESEFVYGDYKVYDVRKMIAKSEQEIGKATAKYFFYSNIMNFFKTEITLANGEIRKRPLIETNGETGEIVWDKGRDFATVRKVLSMPQVNIVKKTEVQTGGFSKESILPKRNSDKLIARKKDWDPKKYGGFDSPTVAYSVLVVAKVEKGKSKKLKSVKELLGITIMERSSFEKNPIDFLEAKGYKEVKKDLIIKLPKYSLFELENGRKRMLASAGELQKGNELALPSKYVNFLYLASHYEKLKGSPEDNEQKQLFVEQHKHYLDEIIEQISEFSKRVILADANLDKVLSAYNKHRDKPIREQAENIIHLFTLTNLGAPAAFKYFDTTIDRKRYTSTKEVLDATLIHQSITGLYETRIDLSQLGGDGGPAPGGGGSSGGTLNIEDEYRLHETSKGPDVPLGSTWLSDFPQAWAETGGMGLAVRQAPLIIPLKATSTPVSIKQYPMSQEARLGIKPHIQRLLDQGILVPCQSPWNTPLLPVKKPGTNDYRPVQDLREVNKRVEDIHPTVPNPYNLLSGLPPSHQWYTVLDLKDAFFCLRLHPTSQSLFAFEWRDPEMGISGQLTWTRLPQGFKNSPTLFNEALHRDLADFRIQHPDLILLQYVDDLLLAATSELDCQQGTRALLQTLGDLGYRASAKKAQICQKQVKYLGYLLKEGQRWLTEARKETVMGQPTPKTPRQLREFLGKAGFCRLFIPGFAEMAAPLYPLTKPGTLFEWGPDQQKAYQEIKQALLTAPALGLPDLTKPFELFVDEKQGYAKGVLTQKLGPWRRPVAYLSKKLDPVAAGWPPCLRMVAAIAVLTKDAGKLTMGQPLVILAPHAVEALVKQPPDRWLSNARMTHYQALLLDTDRVQFGPIVALNPATLLPLPEEGLQHDCLDILAEAHGTRPDLTDQPLPDADHTWYTDGSSFLQEGQRKAGAAVTTETEVVWAKALPAGTSAQRAELIALTQALKMAEGKKLNVYTDSRYAFATAHIHGEIYRRRGWLTSEGKEIKNKDEILALLKALFLPKRLSIIHCPGHQKGNRAEARGNRMADQAAREVATRETPETSTLLAGKRTADGSEFEKRTADGSEFESPKKKAKVE

SEQ ID NO: 7425 - protein, 2094 aa, synthetic construct
MPAAKRVKLDGGDKKYSIGLDIGTNSVGWAVITDEYKVPSKKFKVLGNTDRHSIKKNLIGALLFDSGETAEATRLKRTARRRYTRRKNRICYLQEIFSNEMAKVDDSFFHRLEESFLVEEDKKHERHPIFGNIVDEVAYHEKYPTIYHLRKKLVDSTDKADLRLIYLALAHMIKFRGHFLIEGDLNPDNSDVDKLFIQLVQTYNQLFEENPINASGVDAKAILSARLSKSRRLENLIAQLPGEKKNGLFGNLIALSLGLTPNFKSNFDLAEDAKLQLSKDTYDDDLDNLLAQIGDQYADLFLAAKNLSDAILLSDILRVNTEITKAPLSASMIKRYDEHHQDLTLLKALVRQQLPEKYKEIFFDQSKNGYAGYIDGGASQEEFYKFIKPILEKMDGTEELLVKLNREDLLRKQRTFDNGSIPHQIHLGELHAILRRQEDFYPFLKDNREKIEKILTFRIPYYVGPLARGNSRFAWMTRKSEETITPWNFEEVVDKGASAQSFIERMTNFDKNLPNEKVLPKHSLLYEYFTVYNELTKVKYVTEGMRKPAFLSGEQKKAIVDLLFKTNRKVTVKQLKEDYFKKIECFDSVEISGVEDRFNASLGTYHDLLKIIKDKDFLDNEENEDILEDIVLTLTLFEDREMIEERLKTYAHLFDDKVMKQLKRRRYTGWGRLSRKLINGIRDKQSGKTILDFLKSDGFANRNFMQLIHDDSLTFKEDIQKAQVSGQGDSLHEHIANLAGSPAIKKGILQTVKVVDELVKVMGRHKPENIVIEMARENQTTQKGQKNSRERMKRIEEGIKELGSQILKEHPVENTQLQNEKLYLYYLQNGRDMYVDQELDINRLSDYDVDHIVPQSFLKDDSIDNKVLTRSDKARGKSDNVPSEEVVKKMKNYWRQLLNAKLITQRKFDNLTKAERGGLSELDKAGFIKRQLVETRQITKHVAQILDSRMNTKYDENDKLIREVKVITLKSKLVSDFRKDFQFYKVREINNYHHAHDAYLNAVVGTALIKKYPKLESEFVYGDYKVYDVRKMIAKSEQEIGKATAKYFFYSNIMNFFKTEITLANGEIRKRPLIETNGETGEIVWDKGRDFATVRKVLSMPQVNIVKKTEVQTGGFSKESILPKRNSDKLIARKKDWDPKKYGGFDSPTVAYSVLVVAKVEKGKSKKLKSVKELLGITIMERSSFEKNPIDFLEAKGYKEVKKDLIIKLPKYSLFELENGRKRMLASAGELQKGNELALPSKYVNFLYLASHYEKLKGSPEDNEQKQLFVEQHKHYLDEIIEQISEFSKRVILADANLDKVLSAYNKHRDKPIREQAENIIHLFTLTNLGAPAAFKYFDTTIDRKRYTSTKEVLDATLIHQSITGLYETRIDLSQLGGDGGPAPGGGGSSGGTLNIEDEHRLHETSKEPDVSLGSTWLSDFPQAWAETGGMGLAVRQAPLIIPLKATSTPVSIKQYPMSQEARLGIKPHIQRLLDQGILVPCQSPWNTPLLPVKKPGTNDYRPVQDLREVNKRVEDIHPTVPNPYNLLSGLPPSHQWYTVLDLKDAFFCLRLHPTSQPLFAFEWRDPEMGISGQLTWTRLPQGFKNSPTLFNEALHRDLADFRIQHPDLILLQYVDDLLLAATSELDCQQGTRALLQTLGNLGYRASAKKAQICQKQVKYLGYLLKEGQRWLTEARKETVMGQPTPKTPRQLREFLGTAGFCRLWIPGFAEMAAPLYPLTKPGTLFNWGPDQQKAYQEIKQALLTAPALGLPDLTKPFELFVDEKQGYAKGVLTQKLGPWRRPVAYLSKKLDPVAAGWPPCLRMVAAIAVLTKDAGKLTMGQPLVILAPHAVEALVKQPPDRWLSNARMTHYQALLLDTDRVQFGPVVALNPATLLPLPEEGLQHNCLDILAEAHGTRPDLTDQPLPDADHTWYTDGSSLLQEGQRKAGAAVTTETEVIWAKALPAGTSAQRAELIALTQALKMAEGKKLNVYTDSRYAFATAHIHGEIYRRRGWLTSEGKEIKNKDEILALLKALFLPKRLSIIHCPGHQKGHSAEARGNRMADQAARKAAITETPDTSTLLAGKRTADGSEFEKRTADGSEFESPKKKAKVE

SEQ ID NO: 7426 - protein, 2094 aa, synthetic construct; identical to SEQ ID NO: 7425

SEQ ID NO: 7427 - protein, 2114 aa, synthetic construct
MPAAKRVKLDGGDKKYSIGLDIGTNSVGWAVITDEYKVPSKKFKVLGNTDRHSIKKNLIGALLFDSGETAEATRLKRTARRRYTRRKNRICYLQEIFSNEMAKVDDSFFHRLEESFLVEEDKKHERHPIFGNIVDEVAYHEKYPTIYHLRKKLVDSTDKADLRLIYLALAHMIKFRGHFLIEGDLNPDNSDVDKLFIQLVQTYNQLFEENPINASGVDAKAILSARLSKSRRLENLIAQLPGEKKNGLFGNLIALSLGLTPNFKSNFDLAEDAKLQLSKDTYDDDLDNLLAQIGDQYADLFLAAKNLSDAILLSDILRVNTEITKAPLSASMIKRYDEHHQDLTLLKALVRQQLPEKYKEIFFDQSKNGYAGYIDGGASQEEFYKFIKPILEKMDGTEELLVKLNREDLLRKQRTFDNGSIPHQIHLGELHAILRRQEDFYPFLKDNREKIEKILTFRIPYYVGPLARGNSRFAWMTRKSEETITPWNFEEVVDKGASAQSFIERMTNFDKNLPNEKVLPKHSLLYEYFTVYNELTKVKYVTEGMRKPAFLSGEQKKAIVDLLFKTNRKVTVKQLKEDYFKKIECFDSVEISGVEDRFNASLGTYHDLLKIIKDKDFLDNEENEDILEDIVLTLTLFEDREMIEERLKTYAHLFDDKVMKQLKRRRYTGWGRLSRKLINGIRDKQSGKTILDFLKSDGFANRNFMQLIHDDSLTFKEDIQKAQVSGQGDSLHEHIANLAGSPAIKKGILQTVKVVDELVKVMGRHKPENIVIEMARENQTTQKGQKNSRERMKRIEEGIKELGSQILKEHPVENTQLQNEKLYLYYLQNGRDMYVDQELDINRLSDYDVDHIVPQSFLKDDSIDNKVLTRSDKARGKSDNVPSEEVVKKMKNYWRQLLNAKLITQRKFDNLTKAERGGLSELDKAGFIKRQLVETRQITKHVAQILDSRMNTKYDENDKLIREVKVITLKSKLVSDFRKDFQFYKVREINNYHHAHDAYLNAVVGTALIKKYPKLESEFVYGDYKVYDVRKMIAKSEQEIGKATAKYFFYSNIMNFFKTEITLANGEIRKRPLIETNGETGEIVWDKGRDFATVRKVLSMPQVNIVKKTEVQTGGFSKESILPKRNSDKLIARKKDWDPKKYGGFDSPTVAYSVLVVAKVEKGKSKKLKSVKELLGITIMERSSFEKNPIDFLEAKGYKEVKKDLIIKLPKYSLFELENGRKRMLASAGELQKGNELALPSKYVNFLYLASHYEKLKGSPEDNEQKQLFVEQHKHYLDEIIEQISEFSKRVILADANLDKVLSAYNKHRDKPIREQAENIIHLFTLTNLGAPAAFKYFDTTIDRKRYTSTKEVLDATLIHQSITGLYETRIDLSQLGGDGGPAPGGGGSSGGVQEISDSRPMLHIYLNGRRFLGLLDTGADKTCIAGRDWPANWPIHQTESSLQGLGMACGVARSSQPLRWQHEDKSGIIHPFVIPTLPFTLWGRDIMKDIKVRLMTDSPDDSQDLMIGAIESNLFADQISWKSDQPVWLNQWPLKQEKLQALQQLVTEQLQLGHLEESNSPWNTPVFVIKKKSGKWRLLQDLRAVNATMHDMGALQPGLPSPVAVPKGWEIIIIDLQDCFFNIKLHPEDCKRFAFSVPSPNFKRPYQRFQWKVLPQGMKNSPTLCQKFVDKAILTVRDKYQDSYIVHYMDDILLAHPSRSIVDEILTSMIQALNKHGLVVSTEKIQKYDNLKYLGTHIQGDSVSYQKLQIRTDKLRTLNDFQKLLGNINWIRPFLKLTTGELKPLFEILNPDSNPISTRKLTPEACKALQLMNERLSTARVKRLDLSQPWSLCILKTEYTPTACLWQDGVVEWIHLPHISPKVITPYDIFCTQLIIKGRHRSKELFSKDPDYIVVPYTKVQFDLLLQEKEDWPISLLGFLGEVHFHLPKDPLLTFTLQTAIIFPHMTSTTPLEKGIVIFTDGSANGRSVTYIQGREPIIKENTQNTAQQAEIVAVITAFEEVSQPFNLYTDSKYVTGLFPEIETATLSPRTKIYTELKHLQRLIHKRQEKFYIGHIRGHTGLPGPLAQGNAYADSLTRILTAAGKRTADGSEFEKRTADGSEFESPKKKAKVE

SEQ ID NO: 7428 - protein, 2114 aa, synthetic construct
MPAAKRVKLDGGDKKYSIGLDIGTNSVGWAVITDEYKVPSKKFKVLGNTDRHSIKKNLIGALLFDSGETAEATRLKRTARRRYTRRKNRICYLQEIFSNEMAKVDDSFFHRLEESFLVEEDKKHERHPIFGNIVDEVAYHEKYPTIYHLRKKLVDSTDKADLRLIYLALAHMIKFRGHFLIEGDLNPDNSDVDKLFIQLVQTYNQLFEENPINASGVDAKAILSARLSKSRRLENLIAQLPGEKKNGLFGNLIALSLGLTPNFKSNFDLAEDAKLQLSKDTYDDDLDNLLAQIGDQYADLFLAAKNLSDAILLSDILRVNTEITKAPLSASMIKRYDEHHQDLTLLKALVRQQLPEKYKEIFFDQSKNGYAGYIDGGASQEEFYKFIKPILEKMDGTEELLVKLNREDLLRKQRTFDNGSIPHQIHLGELHAILRRQEDFYPFLKDNREKIEKILTFRIPYYVGPLARGNSRFAWMTRKSEETITPWNFEEVVDKGASAQSFIERMTNFDKNLPNEKVLPKHSLLYEYFTVYNELTKVKYVTEGMRKPAFLSGEQKKAIVDLLFKTNRKVTVKQLKEDYFKKIECFDSVEISGVEDRFNASLGTYHDLLKIIKDKDFLDNEENEDILEDIVLTLTLFEDREMIEERLKTYAHLFDDKVMKQLKRRRYTGWGRLSRKLINGIRDKQSGKTILDFLKSDGFANRNFMQLIHDDSLTFKEDIQKAQVSGQGDSLHEHIANLAGSPAIKKGILQTVKVVDELVKVMGRHKPENIVIEMARENQTTQKGQKNSRERMKRIEEGIKELGSQILKEHPVENTQLQNEKLYLYYLQNGRDMYVDQELDINRLSDYDVDHIVPQSFLKDDSIDNKVLTRSDKARGKSDNVPSEEVVKKMKNYWRQLLNAKLITQRKFDNLTKAERGGLSELDKAGFIKRQLVETRQITKHVAQILDSRMNTKYDENDKLIREVKVITLKSKLVSDFRKDFQFYKVREINNYHHAHDAYLNAVVGTALIKKYPKLESEFVYGDYKVYDVRKMIAKSEQEIGKATAKYFFYSNIMNFFKTEITLANGEIRKRPLIETNGETGEIVWDKGRDFATVRKVLSMPQVNIVKKTEVQTGGFSKESILPKRNSDKLIARKKDWDPKKYGGFDSPTVAYSVLVVAKVEKGKSKKLKSVKELLGITIMERSSFEKNPIDFLEAKGYKEVKKDLIIKLPKYSLFELENGRKRMLASAGELQKGNELALPSKYVNFLYLASHYEKLKGSPEDNEQKQLFVEQHKHYLDEIIEQISEFSKRVILADANLDKVLSAYNKHRDKPIREQAENIIHLFTLTNLGAPAAFKYFDTTIDRKRYTSTKEVLDATLIHQSITGLYETRIDLSQLGGDGGPAPGGGGSSGGVQEISDSRPMLHIYLNGRRFLGLLDTGADKTCIAGRDWPANWPIHQTESSLQGLGMACGVARSSQPLRWQHEDKSGIIHPFVIPTLPFTLWGRDIMKDIKVRLMTDSPDDSQDLMIGAIESNLFADQISWKSDQPVWLNQWPLKQEKLQALQQLVTEQLQLGHLEESNSPWNTPVFVIKKKSGKWRLLQDLRAVNATMHDMGALQPGLPSPVAVPKGWEIIIIDLQDCFFNIKLHPEDCKRFAFSVPSPNFKRPYQRFQWKVLPQGMKNSPTLCQKFVDKAILTVRDKYQDSYIVHYMDDILLAHPSRSIVDEILTSMIQALNKHGLVVSTEKIQKYDNLKYLGTHIQGDSVSYQKLQIRTDKLRTLNDFQKLLGNINWIRPFLKLTTGELKPLFEILNGDSNPISTRKLTPEACKALQLMNERLSTARVKRLDLSQPWSLCILKTEYTPTACLWQDGVVEWIHLPHISPKVITPYDIFCTQLIIKGRHRSKELFSKDPDYIVVPYTKVQFDLLLQEKEDWPISLLGFLGEVHFHLPKDPLLTFTLQTAIIFPHMTSTTPLEKGIVIFTDGSANGRSVTYIQGREPIIKENTQNTAQQAEIVAVITAFEEVSQPFNLYTDSKYVTGLFPEIETATLSPRTKIYTELKHLQRLIHKRQEKFYIGHIRGHTGLPGPLAQGNAYADSLTRILTAAGKRTADGSEFEKRTADGSEFESPKKKAKVE

SEQ ID NO: 7429 - protein, 2086 aa, synthetic construct
MPAAKRVKLDGGDKKYSIGLDIGTNSVGWAVITDEYKVPSKKFKVLGNTDRHSIKKNLIGALLFDSGETAEATRLKRTARRRYTRRKNRICYLQEIFSNEMAKVDDSFFHRLEESFLVEEDKKHERHPIFGNIVDEVAYHEKYPTIYHLRKKLVDSTDKADLRLIYLALAHMIKFRGHFLIEGDLNPDNSDVDKLFIQLVQTYNQLFEENPINASGVDAKAILSARLSKSRRLENLIAQLPGEKKNGLFGNLIALSLGLTPNFKSNFDLAEDAKLQLSKDTYDDDLDNLLAQIGDQYADLFLAAKNLSDAILLSDILRVNTEITKAPLSASMIKRYDEHHQDLTLLKALVRQQLPEKYKEIFFDQSKNGYAGYIDGGASQEEFYKFIKPILEKMDGTEELLVKLNREDLLRKQRTFDNGSIPHQIHLGELHAILRRQEDFYPFLKDNREKIEKILTFRIPYYVGPLARGNSRFAWMTRKSEETITPWNFEEVVDKGASAQSFIERMTNFDKNLPNEKVLPKHSLLYEYFTVYNELTKVKYVTEGMRKPAFLSGEQKKAIVDLLFKTNRKVTVKQLKEDYFKKIECFDSVEISGVEDRFNASLGTYHDLLKIIKDKDFLDNEENEDILEDIVLTLTLFEDREMIEERLKTYAHLFDDKVMKQLKRRRYTGWGRLSRKLINGIRDKQSGKTILDFLKSDGFANRNFMQLIHDDSLTFKEDIQKAQVSGQGDSLHEHIANLAGSPAIKKGILQTVKVVDELVKVMGRHKPENIVIEMARENQTTQKGQKNSRERMKRIEEGIKELGSQILKEHPVENTQLQNEKLYLYYLQNGRDMYVDQELDINRLSDYDVDHIVPQSFLKDDSIDNKVLTRSDKARGKSDNVPSEEVVKKMKNYWRQLLNAKLITQRKFDNLTKAERGGLSELDKAGFIKRQLVETRQITKHVAQILDSRMNTKYDENDKLIREVKVITLKSKLVSDFRKDFQFYKVREINNYHHAHDAYLNAVVGTALIKKYPKLESEFVYGDYKVYDVRKMIAKSEQEIGKATAKYFFYSNIMNFFKTEITLANGEIRKRPLIETNGETGEIVWDKGRDFATVRKVLSMPQVNIVKKTEVQTGGFSKESILPKRNSDKLIARKKDWDPKKYGGFDSPTVAYSVLVVAKVEKGKSKKLKSVKELLGITIMERSSFEKNPIDFLEAKGYKEVKKDLIIKLPKYSLFELENGRKRMLASAGELQKGNELALPSKYVNFLYLASHYEKLKGSPEDNEQKQLFVEQHKHYLDEIIEQISEFSKRVILADANLDKVLSAYNKHRDKPIREQAENIIHLFTLTNLGAPAAFKYFDTTIDRKRYTSTKEVLDATLIHQSITGLYETRIDLSQLGGDGGPAPGGGGSSGGLDDEYRLYSPLVKPDQNIQFWLEQFPQAWAETAGMGLAKQVPPQVIQLKASATPVSVRQYPLSKEAQEGIRPHVQRLIQQGILVPVQSPWNTPLLPVRKPGTNDYRPVQDLREVNKRVQDIHPTVPNPYNLLCALPPQRSWYTVLDLKDAFFCLRLHPTSQPLFAFEWRDPGTGRTGQLTWTRLPQGFKNSPTIFNEALHRDLANFRIQHPQVTLLQYVDDLLLAGATKQDCLEGTKALLLELSDLGYRASAKKAQICRREVTYLGYSLRDGQRWLTEARKKTVVQIPAPTTAKQVREFLGKAGFCRLFIPGFATLAAPLYPLTKPKGEFSWAPEHQKAFDAIKKALLSAPALALPDVTKPFTLYVDERKGVARGVLTQTLGPWRRPVAYLSKKLDPVASGWPVCLKAIAAVAILVKDADKLTLGQNITVIAPHALENIVRQPPDRWMTNARMTHYQSLLLTERVTFAPPAALNPATLLPEETDEPVTHDCHQLLIEETGVRKDLTDIPLTGEVLTWFTDGSSYVVEGKRMAGAAVVDGTRTIWASSLPEGTSAQKAELMALTQALRLAEGKSINIYTDSRYAFATAHVHGAIYKQRGWLTSAGREIKNKEEILSLLEALHLPKRLAIIHCPGHQKAKDPISRGNQMADRVAKQAAQGVNLLPAGKRTADGSEFEKRTADGSEFESPKKKAKVE

SEQ ID NO: 7430 - protein, 2086 aa, synthetic construct; identical to SEQ ID NO: 7429

SEQ ID NO: 7431 - protein, 2085 aa, synthetic construct
MPAAKRVKLDGGDKKYSIGLDIGTNSVGWAVITDEYKVPSKKFKVLGNTDRHSIKKNLIGALLFDSGETAEATRLKRTARRRYTRRKNRICYLQEIFSNEMAKVDDSFFHRLEESFLVEEDKKHERHPIFGNIVDEVAYHEKYPTIYHLRKKLVDSTDKADLRLIYLALAHMIKFRGHFLIEGDLNPDNSDVDKLFIQLVQTYNQLFEENPINASGVDAKAILSARLSKSRRLENLIAQLPGEKKNGLFGNLIALSLGLTPNFKSNFDLAEDAKLQLSKDTYDDDLDNLLAQIGDQYADLFLAAKNLSDAILLSDILRVNTEITKAPLSASMIKRYDEHHQDLTLLKALVRQQLPEKYKEIFFDQSKNGYAGYIDGGASQEEFYKFIKPILEKMDGTEELLVKLNREDLLRKQRTFDNGSIPHQIHLGELHAILRRQEDFYPFLKDNREKIEKILTFRIPYYVGPLARGNSRFAWMTRKSEETITPWNFEEVVDKGASAQSFIERMTNFDKNLPNEKVLPKHSLLYEYFTVYNELTKVKYVTEGMRKPAFLSGEQKKAIVDLLFKTNRKVTVKQLKEDYFKKIECFDSVEISGVEDRFNASLGTYHDLLKIIKDKDFLDNEENEDILEDIVLTLTLFEDREMIEERLKTYAHLFDDKVMKQLKRRRYTGWGRLSRKLINGIRDKQSGKTILDFLKSDGFANRNFMQLIHDDSLTFKEDIQKAQVSGQGDSLHEHIANLAGSPAIKKGILQTVKVVDELVKVMGRHKPENIVIEMARENQTTQKGQKNSRERMKRIEEGIKELGSQILKEHPVENTQLQNEKLYLYYLQNGRDMYVDQELDINRLSDYDVDHIVPQSFLKDDSIDNKVLTRSDKARGKSDNVPSEEVVKKMKNYWRQLLNAKLITQRKFDNLTKAERGGLSELDKAGFIKRQLVETRQITKHVAQILDSRMNTKYDENDKLIREVKVITLKSKLVSDFRKDFQFYKVREINNYHHAHDAYLNAVVGTALIKKYPKLESEFVYGDYKVYDVRKMIAKSEQEIGKATAKYFFYSNIMNFFKTEITLANGEIRKRPLIETNGETGEIVWDKGRDFATVRKVLSMPQVNIVKKTEVQTGGFSKESILPKRNSDKLIARKKDWDPKKYGGFDSPTVAYSVLVVAKVEKGKSKKLKSVKELLGITIMERSSFEKNPIDFLEAKGYKEVKKDLIIKLPKYSLFELENGRKRMLASAGELQKGNELALPSKYVNFLYLASHYEKLKGSPEDNEQKQLFVEQHKHYLDEIIEQISEFSKRVILADANLDKVLSAYNKHRDKPIREQAENIIHLFTLTNLGAPAAFKYFDTTIDRKRYTSTKEVLDATLIHQSITGLYETRIDLSQLGGDGGPAPGGGGSSGGIPWLMKKPLQLTTLVPLQEYEERLLKQTMLTGSYKEKLQSLFLKYDALWQHWENQVGHRRIKPHHIATGTVNPRPQKQYPINPKAKASIQTVINDLLKQGVLIQQNSIMNTPVYPVPKPDGKWRMVLDYREVNKTIPLIAAQNQHSAGILSSIFRGKYKTTLDLSNGFWAHSITPESYWLTAFTWLGQQYCWTRLPQGFLNSPALFTADVVDLLKEVPNVQVYVDDIYISHDDPREHLEQLEKVFSLLLNAGYVVSLKKSEIAQHEVEFLGFNITKEGRGLTETFKQKLLNITPPRDLKQLQSILGLLNFARNFIPNFSELVKPLYNIIATANGKYITWTTDNSQQLQNIISMLNSAENLEERNPEVRLIMKVNTSPSAGYIRFYNEFAKRPIMYLNYVYTKAEVKFTNTEKLLTTIHKGLIKALDLGMGQEILVYSPIVSMTKIQKTPLPERKALPIRWITWMSYLEDPRIQFHYDKTLPELQQVPTVTDDIIAKIKHPSEFSMVFYTDGSAIKHPNVNKSHNAGMGIAQVQFKPEFTVINTWSIPLGDHTAQLAEVAAVEFACKKALKIDGPVLIVTDSFYVAESVNKELPYWQSNGFFNNKKKPLKHVSKWKSIADCIQLKPDIIIIHEKGHQPTASTFHTEGNNLADKLATQGSYVVNAGKRTADGSEFEKRTADGSEFESPKKKAKVE

SEQ ID NO: 7432 - protein, 2085 aa, synthetic construct
MPAAKRVKLDGGDKKYSIGLDIGTNSVGWAVITDEYKVPSKKFKVLGNTDRHSIKKNLIGALLFDSGETAEATRLKRTARRRYTRRKNRICYLQEIFSNEMAKVDDSFFHRLEESFLVEEDKKHERHPIFGNIVDEVAYHEKYPTIYHLRKKLVDSTDKADLRLIYLALAHMIKFRGHFLIEGDLNPDNSDVDKLFIQLVQTYNQLFEENPINASGVDAKAILSARLSKSRRLENLIAQLPGEKKNGLFGNLIALSLGLTPNFKSNFDLAEDAKLQLSKDTYDDDLDNLLAQIGDQYADLFLAAKNLSDAILLSDILRVNTEITKAPLSASMIKRYDEHHQDLTLLKALVRQQLPEKYKEIFFDQSKNGYAGYIDGGASQEEFYKFIKPILEKMDGTEELLVKLNREDLLRKQRTFDNGSIPHQIHLGELHAILRRQEDFYPFLKDNREKIEKILTFRIPYYVGPLARGNSRFAWMTRKSEETITPWNFEEVVDKGASAQSFIERMTNFDKNLPNEKVLPKHSLLYEYFTVYNELTKVKYVTEGMRKPAFLSGEQKKAIVDLLFKTNRKVTVKQLKEDYFKKIECFDSVEISGVEDRFNASLGTYHDLLKIIKDKDFLDNEENEDILEDIVLTLTLFEDREMIEERLKTYAHLFDDKVMKQLKRRRYTGWGRLSRKLINGIRDKQSGKTILDFLKSDGFANRNFMQLIHDDSLTFKEDIQKAQVSGQGDSLHEHIANLAGSPAIKKGILQTVKVVDELVKVMGRHKPENIVIEMARENQTTQKGQKNSRERMKRIEEGIKELGSQILKEHPVENTQLQNEKLYLYYLQNGRDMYVDQELDINRLSDYDVDHIVPQSFLKDDSIDNKVLTRSDKARGKSDNVPSEEVVKKMKNYWRQLLNAKLITQRKFDNLTKAERGGLSELDKAGFIKRQLVETRQITKHVAQILDSRMNTKYDENDKLIREVKVITLKSKLVSDFRKDFQFYKVREINNYHHAHDAYLNAVVGTALIKKYPKLESEFVYGDYKVYDVRKMIAKSEQEIGKATAKYFFYSNIMNFFKTEITLANGEIRKRPLIETNGETGEIVWDKGRDFATVRKVLSMPQVNIVKKTEVQTGGFSKESILPKRNSDKLIARKKDWDPKKYGGFDSPTVAYSVLVVAKVEKGKSKKLKSVKELLGITIMERSSFEKNPIDFLEAKGYKEVKKDLIIKLPKYSLFELENGRKRMLASAGELQKGNELALPSKYVNFLYLASHYEKLKGSPEDNEQKQLFVEQHKHYLDEIIEQISEFSKRVILADANLDKVLSAYNKHRDKPIREQAENIIHLFTLTNLGAPAAFKYFDTTIDRKRYTSTKEVLDATLIHQSITGLYETRIDLSQLGGDGGPAPGGGGSSGGIPWLMKKPLQLTTLVPLQEYEERLLKQTMLTGSYKEKLQSLFLKYDALWQHWENQVGHRRIKPHHIATGTVNPRPQKQYPINPKAKASIQTVINDLLKQGVLIQQNSIMNTPVYPVPKPDGKWRMVLDYREVNKTIPLIAAQNQHSAGILSSIFRGKYKTTLDLSNGFWAHSITPESYWLTAFTWLGQQYCWTRLPQGFLNSPALFNADVVDLLKEVPNVQVYVDDIYISHDDPREHLEQLEKVFSLLLNAGYVVSLKKSEIAQHEVEFLGFNITKEGRGLTETFKQKLLNITPPRDLKQLQSILGLLNFARNFIPNFSELVKPLYNIIATAPGKYITWTTDNSQQLQNIISMLNSAENLEERNPEVRLIMKVNTSPSAGYIRFYNEFAKRPIMYLNYVYTKAEVKFTNTEKLLTTIHKGLIKALDLGMGQEILVYSPIVSMTKIQKTPLPERKALPIRWITWMSYLEDPRIQFHYDKTLPELQQVPTVTDDIIAKIKHPSEFSMVFYTDGSAIKHPNVNKSHNAGMGIAQVQFKPEFTVINTWSIPLGDHTAQLAEVAAVEFACKKALKIDGPVLIVTDSFYVAESVNKELPYWQSNGFFNNKKKPLKHVSKWKSIADCIQLKPDIIIIHEKGHQPTASTFHTEGNNLADKLATQGSYVVNAGKRTADGSEFEKRTADGSEFESPKKKAKVE

SEQ ID NO: 7433 - protein, 2085 aa, synthetic construct
MPAAKRVKLDGGDKKYSIGLDIGTNSVGWAVITDEYKVPSKKFKVLGNTDRHSIKKNLIGALLFDSGETAEATRLKRTARRRYTRRKNRICYLQEIFSNEMAKVDDSFFHRLEESFLVEEDKKHERHPIFGNIVDEVAYHEKYPTIYHLRKKLVDSTDKADLRLIYLALAHMIKFRGHFLIEGDLNPDNSDVDKLFIQLVQTYNQLFEENPINASGVDAKAILSARLSKSRRLENLIAQLPGEKKNGLFGNLIALSLGLTPNFKSNFDLAEDAKLQLSKDTYDDDLDNLLAQIGDQYADLFLAAKNLSDAILLSDILRVNTEITKAPLSASMIKRYDEHHQDLTLLKALVRQQLPEKYKEIFFDQSKNGYAGYIDGGASQEEFYKFIKPILEKMDGTEELLVKLNREDLLRKQRTFDNGSIPHQIHLGELHAILRRQEDFYPFLKDNREKIEKILTFRIPYYVGPLARGNSRFAWMTRKSEETITPWNFEEVVDKGASAQSFIERMTNFDKNLPNEKVLPKHSLLYEYFTVYNELTKVKYVTEGMRKPAFLSGEQKKAIVDLLFKTNRKVTVKQLKEDYFKKIECFDSVEISGVEDRFNASLGTYHDLLKIIKDKDFLDNEENEDILEDIVLTLTLFEDREMIEERLKTYAHLFDDKVMKQLKRRRYTGWGRLSRKLINGIRDKQSGKTILDFLKSDGFANRNFMQLIHDDSLTFKEDIQKAQVSGQGDSLHEHIANLAGSPAIKKGILQTVKVVDELVKVMGRHKPENIVIEMARENQTTQKGQKNSRERMKRIEEGIKELGSQILKEHPVENTQLQNEKLYLYYLQNGRDMYVDQELDINRLSDYDVDHIVPQSFLKDDSIDNKVLTRSDKARGKSDNVPSEEVVKKMKNYWRQLLNAKLITQRKFDNLTKAERGGLSELDKAGFIKRQLVETRQITKHVAQILDSRMNTKYDENDKLIREVKVITLKSKLVSDFRKDFQFYKVREINNYHHAHDAYLNAVVGTALIKKYPKLESEFVYGDYKVYDVRKMIAKSEQEIGKATAKYFFYSNIMNFFKTEITLANGEIRKRPLIETNGETGEIVWDKGRDFATVRKVLSMPQVNIVKKTEVQTGGFSKESILPKRNSDKLIARKKDWDPKKYGGFDSPTVAYSVLVVAKVEKGKSKKLKSVKELLGITIMERSSFEKNPIDFLEAKGYKEVKKDLIIKLPKYSLFELENGRKRMLASAGELQKGNELALPSKYVNFLYLASHYEKLKGSPEDNEQKQLFVEQHKHYLDEIIEQISEFSKRVILADANLDKVLSAYNKHRDKPIREQAENIIHLFTLTNLGAPAAFKYFDTTIDRKRYTSTKEVLDATLIHQSITGLYETRIDLSQLGGDGGPAPGGGGSSGGIPWLMKKPLQLTTLVPLQEYEERLLKQTMLTGSYKEKLQSLFLKYDALWQHWENQVGHRRIKPHHIATGTVNPRPQKQYPINPKAKASIQTVINDLLKQGVLIQQNSIMNTPVYPVPKPDGKWRMVLDYREVNKTIPLIAAQNQHSAGILSSIFRGKYKTTLDLSNGFWAHSITPESYWLTAFTWLGQQYCWTRLPQGFLNSPALFNADVVDLLKEVPNVQVYVDDIYISHDDPREHLEQLEKVFSLLLNAGYVVSLKKSEIAQHEVEFLGFNITKEGRGLTETFKQKLLNITPPRDLKQLQSILGKLNFARNFIPNFSELVKPLYNIIATAPGKYITWTTDNSQQLQNIISMLNSAENLEERNPEVRLIMKVNTSPSAGYIRFYNEFAKRPIMYLNYVYTKAEVKFTNTEKLLTTIHKGLIKALDLGMGQEILVYSPIVSMTKIQKTPLPERKALPIRWITWMSYLEDPRIQFHYDKTLPELQQVPTVTDDIIAKIKHPSEFSMVFYTDGSAIKHPNVNKSHNAGMGIAQVQFKPEFTVINTWSIPLGDHTAQLAEVAAVEFACKKALKIDGPVLIVTDSFYVAESVNKELPYWQSNGFFNNKKKPLKHVSKWKSIADCIQLKPDIIIIHEKGHQPTASTFHTEGNNLADKLATQGSYVVNAGKRTADGSEFEKRTADGSEFESPKKKAKVE

SEQ ID NO: 7434 - protein, 2174 aa, synthetic construct
MPAAKRVKLDGGDKKYSIGLDIGTNSVGWAVITDEYKVPSKKFKVLGNTDRHSIKKNLIGALLFDSGETAEATRLKRTARRRYTRRKNRICYLQEIFSNEMAKVDDSFFHRLEESFLVEEDKKHERHPIFGNIVDEVAYHEKYPTIYHLRKKLVDSTDKADLRLIYLALAHMIKFRGHFLIEGDLNPDNSDVDKLFIQLVQTYNQLFEENPINASGVDAKAILSARLSKSRRLENLIAQLPGEKKNGLFGNLIALSLGLTPNFKSNFDLAEDAKLQLSKDTYDDDLDNLLAQIGDQYADLFLAAKNLSDAILLSDILRVNTEITKAPLSASMIKRYDEHHQDLTLLKALVRQQLPEKYKEIFFDQSKNGYAGYIDGGASQEEFYKFIKPILEKMDGTEELLVKLNREDLLRKQRTFDNGSIPHQIHLGELHAILRRQEDFYPFLKDNREKIEKILTFRIPYYVGPLARGNSRFAWMTRKSEETITPWNFEEVVDKGASAQSFIERMTNFDKNLPNEKVLPKHSLLYEYFTVYNELTKVKYVTEGMRKPAFLSGEQKKAIVDLLFKTNRKVTVKQLKEDYFKKIECFDSVEISGVEDRFNASLGTYHDLLKIIKDKDFLDNEENEDILEDIVLTLTLFEDREMIEERLKTYAHLFDDKVMKQLKRRRYTGWGRLSRKLINGIRDKQSGKTILDFLKSDGFANRNFMQLIHDDSLTFKEDIQKAQVSGQGDSLHEHIANLAGSPAIKKGILQTVKVVDELVKVMGRHKPENIVIEMARENQTTQKGQKNSRERMKRIEEGIKELGSQILKEHPVENTQLQNEKLYLYYLQNGRDMYVDQELDINRLSDYDVDHIVPQSFLKDDSIDNKVLTRSDKARGKSDNVPSEEVVKKMKNYWRQLLNAKLITQRKFDNLTKAERGGLSELDKAGFIKRQLVETRQITKHVAQILDSRMNTKYDENDKLIREVKVITLKSKLVSDFRKDFQFYKVREINNYHHAHDAYLNAVVGTALIKKYPKLESEFVYGDYKVYDVRKMIAKSEQEIGKATAKYFFYSNIMNFFKTEITLANGEIRKRPLIETNGETGEIVWDKGRDFATVRKVLSMPQVNIVKKTEVQTGGFSKESILPKRNSDKLIARKKDWDPKKYGGFDSPTVAYSVLVVAKVEKGKSKKLKSVKELLGITIMERSSFEKNPIDFLEAKGYKEVKKDLIIKLPKYSLFELENGRKRMLASAGELQKGNELALPSKYVNFLYLASHYEKLKGSPEDNEQKQLFVEQHKHYLDEIIEQISEFSKRVILADANLDKVLSAYNKHRDKPIREQAENIIHLFTLTNLGAPAAFKYFDTTIDRKRYTSTKEVLDATLIHQSITGLYETRIDLSQLGGDGGPAPGGGGSSGGMDPLQLLQPLEAEIKGTKLKAHWNSGATITCVPQAFLEEEVPIKNIWIKTIHGEKEQPVYYLTFKIQGRKVEAEVISSPYDYILVSPSDIPWLMKKPLQLTTLVPLQEYEERLLKQTMLTGSYKEKLQSLFLKYDALWQHWENQVGHRRIKPHHIATGTVNPRPQKQYPINPKAKASIQTVINDLLKQGVLIQQNSIMNTPVYPVPKPDGKWRMVLDYREVNKTIPLIAAQNQHSAGILSSIFRGKYKTTLDLSNGFWAHSITPESYWLTAFTWLGQQYCWTRLPQGFLNSPALFNADVVDLLKEVPNVQVYVDDIYISHDDPREHLEQLEKVFSLLLNAGYVVSLKKSEIAQHEVEFLGFNITKEGRGLTETFKQKLLNITPPRDLKQLQSILGKLNFARNFIPNFSELVKPLYNIIATAPGKYITWTTDNSQQLQNIISMLNSAENLEERNPEVRLIMKVNTSPSAGYIRFYNEFAKRPIMYLNYVYTKAEVKFTNTEKLLTTIHKGLIKALDLGMGQEILVYSPIVSMTKIQKTPLPERKALPIRWITWMSYLEDPRIQFHYDKTLPELQQVPTVTDDIIAKIKHPSEFSMVFYTDGSAIKHPNVNKSHNAGMGIAQVQFKPEFTVINTWSIPLGDHTAQLAEVAAVEFACKKALKIDGPVLIVTDSFYVAESVNKELPYWQSNGFFNNKKKPLKHVSKWKSIADCIQLKPDIIIIHEKGHQPTASTFHTEGNNLADKLATQGSYVVNAGKRTADGSEFEKRTADGSEFESPKKKAKVE

SEQ ID NO: 7435 - protein, 2092 aa, synthetic construct
MPAAKRVKLDGGDKKYSIGLDIGTNSVGWAVITDEYKVPSKKFKVLGNTDRHSIKKNLIGALLFDSGETAEATRLKRTARRRYTRRKNRICYLQEIFSNEMAKVDDSFFHRLEESFLVEEDKKHERHPIFGNIVDEVAYHEKYPTIYHLRKKLVDSTDKADLRLIYLALAHMIKFRGHFLIEGDLNPDNSDVDKLFIQLVQTYNQLFEENPINASGVDAKAILSARLSKSRRLENLIAQLPGEKKNGLFGNLIALSLGLTPNFKSNFDLAEDAKLQLSKDTYDDDLDNLLAQIGDQYADLFLAAKNLSDAILLSDILRVNTEITKAPLSASMIKRYDEHHQDLTLLKALVRQQLPEKYKEIFFDQSKNGYAGYIDGGASQEEFYKFIKPILEKMDGTEELLVKLNREDLLRKQRTFDNGSIPHQIHLGELHAILRRQEDFYPFLKDNREKIEKILTFRIPYYVGPLARGNSRFAWMTRKSEETITPWNFEEVVDKGASAQSFIERMTNFDKNLPNEKVLPKHSLLYEYFTVYNELTKVKYVTEGMRKPAFLSGEQKKAIVDLLFKTNRKVTVKQLKEDYFKKIECFDSVEISGVEDRFNASLGTYHDLLKIIKDKDFLDNEENEDILEDIVLTLTLFEDREMIEERLKTYAHLFDDKVMKQLKRRRYTGWGRLSRKLINGIRDKQSGKTILDFLKSDGFANRNFMQLIHDDSLTFKEDIQKAQVSGQGDSLHEHIANLAGSPAIKKGILQTVKVVDELVKVMGRHKPENIVIEMARENQTTQKGQKNSRERMKRIEEGIKELGSQILKEHPVENTQLQNEKLYLYYLQNGRDMYVDQELDINRLSDYDVDHIVPQSFLKDDSIDNKVLTRSDKARGKSDNVPSEEVVKKMKNYWRQLLNAKLITQRKFDNLTKAERGGLSELDKAGFIKRQLVETRQITKHVAQILDSRMNTKYDENDKLIREVKVITLKSKLVSDFRKDFQFYKVREINNYHHAHDAYLNAVVGTALIKKYPKLESEFVYGDYKVYDVRKMIAKSEQEIGKATAKYFFYSNIMNFFKTEITLANGEIRKRPLIETNGETGEIVWDKGRDFATVRKVLSMPQVNIVKKTEVQTGGFSKESILPKRNSDKLIARKKDWDPKKYGGFDSPTVAYSVLVVAKVEKGKSKKLKSVKELLGITIMERSSFEKNPIDFLEAKGYKEVKKDLIIKLPKYSLFELENGRKRMLASAGELQKGNELALPSKYVNFLYLASHYEKLKGSPEDNEQKQLFVEQHKHYLDEIIEQISEFSKRVILADANLDKVLSAYNKHRDKPIREQAENIIHLFTLTNLGAPAAFKYFDTTIDRKRYTSTKEVLDATLIHQSITGLYETRIDLSQLGGDGGPAPGGGGSSGGVLNLEEEYRLHEKPVPSSIDPSWLQLFPTVWAERAGMGLANQVPPVVVELRSGASPVAVRQYPMSKEAREGIRPHIQRFLDLGVLVPCQSPWNTPLLPVKKPGTNDYRPVQDLREINKRVQDIHPTVPNPYNLLSSLPPSHTWYSVLDLKDAFFCLKLHPNSQPLFAFEWRDPEKGNTGQLTWTRLPQGFKNSPTLFNEALHRDLAPFRALNPQVVLLQYVDDLLVAAPTYRDCKEGTQKLLQELSKLGYRVSAKKAQLCQKEVTYLGYLLKEGKRWLTPARKATVMKIPPPTTPRQVREFLGTAGFCRLWIPGFASLAAPLYPLTKPSIPFIWTEEHQKAFDRIKEALLSAPALALPDLTKPFTLYVDERAGVARGVLTQTLGPWRRPVAYLSKKLDPVASGWPTCLKAVAAVALLLKDADKLTLGQNVTVIASHSLESIVRQPPDRWMTNARMTHYQSLLLNERVSFAPPAVLNPATLLPVESEATPVHRCSEILAEETGTRRDLKDQPLPGVPAWYTDGSSFIAEGKRRAGAAIVDGKRTVWASSLPEGTSAQKAELVALTQALRLAEGKDINIYTDSRYAFATAHIHGAIYKQRGWLTSAGKDIKNKEEILALLEAIHLPKRVAIIHCPGHQKGNDPVATGNRRADEAAKQAALSTRVLAETTKPAGKRTADGSEFEKRTADGSEFESPKKKAKVE

SEQ ID NO: 7436 - protein, 2094 aa, synthetic construct
MPAAKRVKLDGGDKKYSIGLDIGTNSVGWAVITDEYKVPSKKFKVLGNTDRHSIKKNLIGALLFDSGETAEATRLKRTARRRYTRRKNRICYLQEIFSNEMAKVDDSFFHRLEESFLVEEDKKHERHPIFGNIVDEVAYHEKYPTIYHLRKKLVDSTDKADLRLIYLALAHMIKFRGHFLIEGDLNPDNSDVDKLFIQLVQTYNQLFEENPINASGVDAKAILSARLSKSRRLENLIAQLPGEKKNGLFGNLIALSLGLTPNFKSNFDLAEDAKLQLSKDTYDDDLDNLLAQIGDQYADLFLAAKNLSDAILLSDILRVNTEITKAPLSASMIKRYDEHHQDLTLLKALVRQQLPEKYKEIFFDQSKNGYAGYIDGGASQEEFYKFIKPILEKMDGTEELLVKLNREDLLRKQRTFDNGSIPHQIHLGELHAILRRQEDFYPFLKDNREKIEKILTFRIPYYVGPLARGNSRFAWMTRKSEETITPWNFEEVVDKGASAQSFIERMTNFDKNLPNEKVLPKHSLLYEYFTVYNELTKVKYVTEGMRKPAFLSGEQKKAIVDLLFKTNRKVTVKQLKEDYFKKIECFDSVEISGVEDRFNASLGTYHDLLKIIKDKDFLDNEENEDILEDIVLTLTLFEDREMIEERLKTYAHLFDDKVMKQLKRRRYTGWGRLSRKLINGIRDKQSGKTILDFLKSDGFANRNFMQLIHDDSLTFKEDIQKAQVSGQGDSLHEHIANLAGSPAIKKGILQTVKVVDELVKVMGRHKPENIVIEMARENQTTQKGQKNSRERMKRIEEGIKELGSQILKEHPVENTQLQNEKLYLYYLQNGRDMYVDQELDINRLSDYDVDHIVPQSFLKDDSIDNKVLTRSDKARGKSDNVPSEEVVKKMKNYWRQLLNAKLITQRKFDNLTKAERGGLSELDKAGFIKRQLVETRQITKHVAQILDSRMNTKYDENDKLIREVKVITLKSKLVSDFRKDFQFYKVREINNYHHAHDAYLNAVVGTALIKKYPKLESEFVYGDYKVYDVRKMIAKSEQEIGKATAKYFFYSNIMNFFKTEITLANGEIRKRPLIETNGETGEIVWDKGRDFATVRKVLSMPQVNIVKKTEVQTGGFSKESILPKRNSDKLIARKKDWDPKKYGGFDSPTVAYSVLVVAKVEKGKSKKLKSVKELLGITIMERSSFEKNPIDFLEAKGYKEVKKDLIIKLPKYSLFELENGRKRMLASAGELQKGNELALPSKYVNFLYLASHYEKLKGSPEDNEQKQLFVEQHKHYLDEIIEQISEFSKRVILADANLDKVLSAYNKHRDKPIREQAENIIHLFTLTNLGAPAAFKYFDTTIDRKRYTSTKEVLDATLIHQSITGLYETRIDLSQLGGDGGPAPGGGGSSGGTLNIEDEYRLHETSKEPDVPLGSTWLSDFPQAWAETGGMGLAVRQAPLIIPLKATSTPVSIKQYPMSQEARLGIKPHIQRLLDQGILVPCQSPWNTPLLPVKKPGTNDYRPVQDLREVNKRVEDIHPTVPNPYNLLSGLPPSHQWYTVLDLKDAFFCLRLHPTSQPLFAFEWRDPEMGISGQLTWTRLPQGFKNSPTLFNEALHRDLADFRIQHPDLILLQYVDDLLLAATSEQDCQRGTRALLQTLGNLGYRASAKKAQICQKQVKYLGYLLKEGQRWLTEARKETVMGQPTPKTPRQLREFLGTAGFCRLWIPGFAEMAAPLYPLTKPGTLFNWGPDQQKAYQEIKQALLTAPALGLPDLTKPFELFVDEKQGYAKGVLTQKLGPWRRPVAYLSKKLDPVAAGWPPCLRMVAAIAVLTKDAGKLTMGQPLVILAPHAVEALVKQPPDRWLSNARMTHYQAMLLDTDRVQFGPVVALNPATLLPLPEKEAPHDCLEILAETHGTRPDLTDQPIPDADYTWYTDGSSFLQEGQRRAGAAVTTETEVIWARALPAGTSAQRAELIALTQALKMAEGKKLNVYTDSRYAFATAHVHGEIYRRRGWLTSEGREIKNKNEILALLKALFLPKRLSIIHCPGHQKGNSAEARGNRMADQAAREAAMKAVLETSTLLAGKRTADGSEFEKRTADGSEFESPKKKAKVE

SEQ ID NO: 7437 - protein, 2094 aa, synthetic construct
MPAAKRVKLDGGDKKYSIGLDIGTNSVGWAVITDEYKVPSKKFKVLGNTDRHSIKKNLIGALLFDSGETAEATRLKRTARRRYTRRKNRICYLQEIFSNEMAKVDDSFFHRLEESFLVEEDKKHERHPIFGNIVDEVAYHEKYPTIYHLRKKLVDSTDKADLRLIYLALAHMIKFRGHFLIEGDLNPDNSDVDKLFIQLVQTYNQLFEENPINASGVDAKAILSARLSKSRRLENLIAQLPGEKKNGLFGNLIALSLGLTPNFKSNFDLAEDAKLQLSKDTYDDDLDNLLAQIGDQYADLFLAAKNLSDAILLSDILRVNTEITKAPLSASMIKRYDEHHQDLTLLKALVRQQLPEKYKEIFFDQSKNGYAGYIDGGASQEEFYKFIKPILEKMDGTEELLVKLNREDLLRKQRTFDNGSIPHQIHLGELHAILRRQEDFYPFLKDNREKIEKILTFRIPYYVGPLARGNSRFAWMTRKSEETITPWNFEEVVDKGASAQSFIERMTNFDKNLPNEKVLPKHSLLYEYFTVYNELTKVKYVTEGMRKPAFLSGEQKKAIVDLLFKTNRKVTVKQLKEDYFKKIECFDSVEISGVEDRFNASLGTYHDLLKIIKDKDFLDNEENEDILEDIVLTLTLFEDREMIEERLKTYAHLFDDKVMKQLKRRRYTGWGRLSRKLINGIRDKQSGKTILDFLKSDGFANRNFMQLIHDDSLTFKEDIQKAQVSGQGDSLHEHIANLAGSPAIKKGILQTVKVVDELVKVMGRHKPENIVIEMARENQTTQKGQKNSRERMKRIEEGIKELGSQILKEHPVENTQLQNEKLYLYYLQNGRDMYVDQELDINRLSDYDVDHIVPQSFLKDDSIDNKVLTRSDKARGKSDNVPSEEVVKKMKNYWRQLLNAKLITQRKFDNLTKAERGGLSELDKAGFIKRQLVETRQITKHVAQILDSRMNTKYDENDKLIREVKVITLKSKLVSDFRKDFQFYKVREINNYHHAHDAYLNAVVGTALIKKYPKLESEFVYGDYKVYDVRKMIAKSEQEIGKATAKYFFYSNIMNFFKTEITLANGEIRKRPLIETNGETGEIVWDKGRDFATVRKVLSMPQVNIVKKTEVQTGGFSKESILPKRNSDKLIARKKDWDPKKYGGFDSPTVAYSVLVVAKVEKGKSKKLKSVKELLGITIMERSSFEKNPIDFLEAKGYKEVKKDLIIKLPKYSLFELENGRKRMLASAGELQKGNELALPSKYVNFLYLASHYEKLKGSPEDNEQKQLFVEQHKHYLDEIIEQISEFSKRVILADANLDKVLSAYNKHRDKPIREQAENIIHLFTLTNLGAPAAFKYFDTTIDRKRYTSTKEVLDATLIHQSITGLYETRIDLSQLGGDGGPAPGGGGSSGGTLNIEDEYRLHETSKEPDVPLGSTWLSDFPQAWAETGGMGLAVRQAPLIIPLKATSTPVSIKQYPMSQEARLGIKPHIQRLLDQGILVPCQSPWNTPLLPVKKPGTNDYRPVQDLREVNKRVEDIHPTVPNPYNLLSGLPPSHQWYTVLDLKDAFFCLRLHPTSQPLFAFEWRDPEMGISGQLTWTRLPQGFKNSPTLFNEALHRDLADFRIQHPDLILLQYVDDLLLAATSEQDCQRGTRALLQTLGNLGYRASAKKAQICQKQVKYLGYLLKEGQRWLTEARKETVMGQPTPKTPRQLREFLGKAGFCRLFIPGFAEMAAPLYPLTKPGTLFNWGPDQQKAYQEIKQALLTAPALGLPDLTKPFELFVDEKQGYAKGVLTQKLGPWRRPVAYLSKKLDPVAAGWPPCLRMVAAIAVLTKDAGKLTMGQPLVILAPHAVEALVKQPPDRWLSNARMTHYQAMLLDTDRVQFGPVVALNPATLLPLPEKEAPHDCLEILAETHGTRPDLTDQPIPDADYTWYTDGSSFLQEGQRRAGAAVTTETEVIWARALPAGTSAQRAELIALTQALKMAEGKKLNVYTDSRYAFATAHVHGEIYRRRGWLTSEGREIKNKNEILALLKALFLPKRLSIIHCPGHQKGNSAEARGNRMADQAAREAAMKAVLETSTLLAGKRTADGSEFEKRTADGSEFESPKKKAKVE

SEQ ID NO: 7438 - protein, 2096 aa, synthetic construct
MPAAKRVKLDGGDKKYSIGLDIGTNSVGWAVITDEYKVPSKKFKVLGNTDRHSIKKNLIGALLFDSGETAEATRLKRTARRRYTRRKNRICYLQEIFSNEMAKVDDSFFHRLEESFLVEEDKKHERHPIFGNIVDEVAYHEKYPTIYHLRKKLVDSTDKADLRLIYLALAHMIKFRGHFLIEGDLNPDNSDVDKLFIQLVQTYNQLFEENPINASGVDAKAILSARLSKSRRLENLIAQLPGEKKNGLFGNLIALSLGLTPNFKSNFDLAEDAKLQLSKDTYDDDLDNLLAQIGDQYADLFLAAKNLSDAILLSDILRVNTEITKAPLSASMIKRYDEHHQDLTLLKALVRQQLPEKYKEIFFDQSKNGYAGYIDGGASQEEFYKFIKPILEKMDGTEELLVKLNREDLLRKQRTFDNGSIPHQIHLGELHAILRRQEDFYPFLKDNREKIEKILTFRIPYYVGPLARGNSRFAWMTRKSEETITPWNFEEVVDKGASAQSFIERMTNFDKNLPNEKVLPKHSLLYEYFTVYNELTKVKYVTEGMRKPAFLSGEQKKAIVDLLFKTNRKVTVKQLKEDYFKKIECFDSVEISGVEDRFNASLGTYHDLLKIIKDKDFLDNEENEDILEDIVLTLTLFEDREMIEERLKTYAHLFDDKVMKQLKRRRYTGWGRLSRKLINGIRDKQSGKTILDFLKSDGFANRNFMQLIHDDSLTFKEDIQKAQVSGQGDSLHEHIANLAGSPAIKKGILQTVKVVDELVKVMGRHKPENIVIEMARENQTTQKGQKNSRERMKRIEEGIKELGSQILKEHPVENTQLQNEKLYLYYLQNGRDMYVDQELDINRLSDYDVDHIVPQSFLKDDSIDNKVLTRSDKARGKSDNVPSEEVVKKMKNYWRQLLNAKLITQRKFDNLTKAERGGLSELDKAGFIKRQLVETRQITKHVAQILDSRMNTKYDENDKLIREVKVITLKSKLVSDFRKDFQFYKVREINNYHHAHDAYLNAVVGTALIKKYPKLESEFVYGDYKVYDVRKMIAKSEQEIGKATAKYFFYSNIMNFFKTEITLANGEIRKRPLIETNGETGEIVWDKGRDFATVRKVLSMPQVNIVKKTEVQTGGFSKESILPKRNSDKLIARKKDWDPKKYGGFDSPTVAYSVLVVAKVEKGKSKKLKSVKELLGITIMERSSFEKNPIDFLEAKGYKEVKKDLIIKLPKYSLFELENGRKRMLASAGELQKGNELALPSKYVNFLYLASHYEKLKGSPEDNEQKQLFVEQHKHYLDEIIEQISEFSKRVILADANLDKVLSAYNKHRDKPIREQAENIIHLFTLTNLGAPAAFKYFDTTIDRKRYTSTKEVLDATLIHQSITGLYETRIDLSQLGGDGGPAPGSSGGGGGTAPLEEEYRLFLEAPIQNVTLLEQWKREIPKVWAEINPPGLASTQAPIHVQLLSTALPVRVRQYPITLEAKRSLRETIRKFRAAGILRPVHSPWNTPLLPVRKSGTSEYRMVQDLREVNKRVETIHPTVPNPYTLLSLLPPDRIWYSVLDLKDAFFCIPLAPESQLIFAFEWADAEEGESGQLTWTRLPQGFKNSPTLFNEALNRDLQGFRLDHPSVSLLQYVDDLLIAADTQAACLSATRDLLMTLAELGYRVSGKKAQLCQEEVTYLGFKIHKGSRSLSNSRTQAILQIPVPKTKRQVREFLGKIGYCRLFIPGFAELAQPLYAATRPGNDPLVWGEKEEEAFQSLKLALTQPPALALPSLDKPFQLFVEETSGAAKGVLTQALGPWKRPVAYLSKRLDPVAAGWPRCLRAIAAAALLTREASKLTFGQDIEITSSHNLESLLRSPPDKWLTNARITQYQVLLLDPPRVRFKQTAALNPATLLPETDDTLPIHHCLDTLDSLTSTRPDLTDQPLAQAEATLFTDGSSYIRDGKRYAGAAVVTLDSVIWAEPLPIGTSAQKAELIALTKALEWSKDKSVNIYTDSRYAFATLHVHGMIYRERGWLTAGGKAIKNAPEILALLTAVWLPKRVAVMHCKGHQKDDAPTSTGNRRADEVAREVAIRPLSTQATISAGKRTADGSEFEKRTADGSEFESPKKKAKVE

SEQ ID NO: 7439 - protein, 2171 aa, synthetic construct
MPAAKRVKLDGGDKKYSIGLDIGTNSVGWAVITDEYKVPSKKFKVLGNTDRHSIKKNLIGALLFDSGETAEATRLKRTARRRYTRRKNRICYLQEIFSNEMAKVDDSFFHRLEESFLVEEDKKHERHPIFGNIVDEVAYHEKYPTIYHLRKKLVDSTDKADLRLIYLALAHMIKFRGHFLIEGDLNPDNSDVDKLFIQLVQTYNQLFEENPINASGVDAKAILSARLSKSRRLENLIAQLPGEKKNGLFGNLIALSLGLTPNFKSNFDLAEDAKLQLSKDTYDDDLDNLLAQIGDQYADLFLAAKNLSDAILLSDILRVNTEITKAPLSASMIKRYDEHHQDLTLLKALVRQQLPEKYKEIFFDQSKNGYAGYIDGGASQEEFYKFIKPILEKMDGTEELLVKLNREDLLRKQRTFDNGSIPHQIHLGELHAILRRQEDFYPFLKDNREKIEKILTFRIPYYVGPLARGNSRFAWMTRKSEETITPWNFEEVVDKGASAQSFIERMTNFDKNLPNEKVLPKHSLLYEYFTVYNELTKVKYVTEGMRKPAFLSGEQKKAIVDLLFKTNRKVTVKQLKEDYFKKIECFDSVEISGVEDRFNASLGTYHDLLKIIKDKDFLDNEENEDILEDIVLTLTLFEDREMIEERLKTYAHLFDDKVMKQLKRRRYTGWGRLSRKLINGIRDKQSGKTILDFLKSDGFANRNFMQLIHDDSLTFKEDIQKAQVSGQGDSLHEHIANLAGSPAIKKGILQTVKVVDELVKVMGRHKPENIVIEMARENQTTQKGQKNSRERMKRIEEGIKELGSQILKEHPVENTQLQNEKLYLYYLQNGRDMYVDQELDINRLSDYDVDHIVPQSFLKDDSIDNKVLTRSDKARGKSDNVPSEEVVKKMKNYWRQLLNAKLITQRKFDNLTKAERGGLSELDKAGFIKRQLVETRQITKHVAQILDSRMNTKYDENDKLIREVKVITLKSKLVSDFRKDFQFYKVREINNYHHAHDAYLNAVVGTALIKKYPKLESEFVYGDYKVYDVRKMIAKSEQEIGKATAKYFFYSNIMNFFKTEITLANGEIRKRPLIETNGETGEIVWDKGRDFATVRKVLSMPQVNIVKKTEVQTGGFSKESILPKRNSDKLIARKKDWDPKKYGGFDSPTVAYSVLVVAKVEKGKSKKLKSVKELLGITIMERSSFEKNPIDFLEAKGYKEVKKDLIIKLPKYSLFELENGRKRMLASAGELQKGNELALPSKYVNFLYLASHYEKLKGSPEDNEQKQLFVEQHKHYLDEIIEQISEFSKRVILADANLDKVLSAYNKHRDKPIREQAENIIHLFTLTNLGAPAAFKYFDTTIDRKRYTSTKEVLDATLIHQSITGLYETRIDLSQLGGDGGPAPGSSGGGGGMDLLKPLTVERKGVKIKGYWNSQADITCVPKDLLQGEEPVRQQNVTTIHGTQEGDVYYVNLKIDGRRINTEVIGTTLDYAIITPGDVPWILKKPLELTIKLDLEEQQGTLLNNSILSKKGKEELKQLFEKYSALWQSWENQVGHRRIRPHKIATGTVKPTPQKQYHINPKAKPDIQIVINDLLKQGVLIQKESTMNTPVYPVPKPNGRWRMVLDYRAVNKVTPLIAVQNQHSYGILGSLFKGRYKTTIDLSNGFWAHPIVPEDYWITAFTWQGKQYCWTVLPQGFLNSPGLFTGDVVDLLQGIPNVEVYVDDVYISHDSEKEHLEYLDILFNRLKEAGYIISLKKSNIANSIVDFLGFQITNEGRGLTDTFKEKLENITAPTTLKQLQSILGLLNFARNFIPDFTELIAPLYALIPKSTKNYVPWQIEHSTTLETLITKLNGAEYLQGRKGDKTLIMKVNASYTTGYIRYYNEGEKKPISYVSIVFSKTELKFTELEKLLTTVHKGLLKALDLSMGQNIHVYSPIVSMQNIQKTPQTAKKALASRWLSWLSYLEDPRIRFFYDPQMPALKDLPAVDTGKDNKKHPSNFQHIFYTDGSAITSPTKEGHLNAGMGIVYFINKDGNLQKQQEWSISLGNHTAQFAEIAAFEFALKKCLPLGGNILVVTDSNYVAKAYNEELDVWASNGFVNNRKKPLKHISKWKSVADLKRLRPDVVVTHEPGHQKLDSSPHAYGNNLADQLATQASFKVHAGKRTADGSEFEKRTADGSEFESPKKKAKVE

SEQ ID NO: 7440 - protein, 2174 aa, synthetic construct
MPAAKRVKLDGGDKKYSIGLDIGTNSVGWAVITDEYKVPSKKFKVLGNTDRHSIKKNLIGALLFDSGETAEATRLKRTARRRYTRRKNRICYLQEIFSNEMAKVDDSFFHRLEESFLVEEDKKHERHPIFGNIVDEVAYHEKYPTIYHLRKKLVDSTDKADLRLIYLALAHMIKFRGHFLIEGDLNPDNSDVDKLFIQLVQTYNQLFEENPINASGVDAKAILSARLSKSRRLENLIAQLPGEKKNGLFGNLIALSLGLTPNFKSNFDLAEDAKLQLSKDTYDDDLDNLLAQIGDQYADLFLAAKNLSDAILLSDILRVNTEITKAPLSASMIKRYDEHHQDLTLLKALVRQQLPEKYKEIFFDQSKNGYAGYIDGGASQEEFYKFIKPILEKMDGTEELLVKLNREDLLRKQRTFDNGSIPHQIHLGELHAILRRQEDFYPFLKDNREKIEKILTFRIPYYVGPLARGNSRFAWMTRKSEETITPWNFEEVVDKGASAQSFIERMTNFDKNLPNEKVLPKHSLLYEYFTVYNELTKVKYVTEGMRKPAFLSGEQKKAIVDLLFKTNRKVTVKQLKEDYFKKIECFDSVEISGVEDRFNASLGTYHDLLKIIKDKDFLDNEENEDILEDIVLTLTLFEDREMIEERLKTYAHLFDDKVMKQLKRRRYTGWGRLSRKLINGIRDKQSGKTILDFLKSDGFANRNFMQLIHDDSLTFKEDIQKAQVSGQGDSLHEHIANLAGSPAIKKGILQTVKVVDELVKVMGRHKPENIVIEMARENQTTQKGQKNSRERMKRIEEGIKELGSQILKEHPVENTQLQNEKLYLYYLQNGRDMYVDQELDINRLSDYDVDHIVPQSFLKDDSIDNKVLTRSDKARGKSDNVPSEEVVKKMKNYWRQLLNAKLITQRKFDNLTKAERGGLSELDKAGFIKRQLVETRQITKHVAQILDSRMNTKYDENDKLIREVKVITLKSKLVSDFRKDFQFYKVREINNYHHAHDAYLNAVVGTALIKKYPKLESEFVYGDYKVYDVRKMIAKSEQEIGKATAKYFFYSNIMNFFKTEITLANGEIRKRPLIETNGETGEIVWDKGRDFATVRKVLSMPQVNIVKKTEVQTGGFSKESILPKRNSDKLIARKKDWDPKKYGGFDSPTVAYSVLVVAKVEKGKSKKLKSVKELLGITIMERSSFEKNPIDFLEAKGYKEVKKDLIIKLPKYSLFELENGRKRMLASAGELQKGNELALPSKYVNFLYLASHYEKLKGSPEDNEQKQLFVEQHKHYLDEIIEQISEFSKRVILADANLDKVLSAYNKHRDKPIREQAENIIHLFTLTNLGAPAAFKYFDTTIDRKRYTSTKEVLDATLIHQSITGLYETRIDLSQLGGDGGPAPGSSGGGGGMNPLQLLQPLPAEIKGTKLLAHWNSGATITCIPESFLEDEQPIKKTLIKTIHGEKQQNVYYVTFKVKGRKVEAEVIASPYEYILLSPTDVPWLTQQPLQLTILVPLQEYQEKILSKTALPEDQKQQLKTLFVKYDNLWQHWENQVGHRKIRPHNIATGDYPPRPQKQYPINPKAKPSIQIVIDDLLKQGVLTPQNSTMNTPVYPVPKPDGRWRMVLDYREVNKTIPLTAAQNQHSAGILATIVRQKYKTTLDLANGFWAHPITPESYWLTAFTWQGKQYCWTRLPQGFLNSPALFNADVVDLLKEIPNVQVYVDDIYLSHDDPKEHVQQLEKVFQILLQAGYVVSLKKSEIGQKTVEFLGFNITKEGRGLTDTFKTKLLNITPPKDLKQLQSILGKLNFARNFIPNFAELVQPLYNLIAPAKGKYIEWSEENTKQLNMVIEALNTASNLEERLPEQRLVIKVNTSPSAGYVRYYNETGKKPIMYLNYVFSKAELKFSMLEKLLTTMHKALIKAMDLAMGQEILVYSPIVSMTKIQKTPLPERKALPIRWITWMTYLEDPRIQFHYDKTLPELKHIPDVYTSSQSPVKHPSQYEGVFYTDGSAIKSPDPTKSNNAGMGIVHATYKPEYQVLNQWSIPLGNHTAQMAEIAAVEFACKKALKIPGPVLVITDSFYVAESANKELPYWKSNGFVNNKKKPLKHISKWKSIAECLSMKPDITIQHEKGISLQIPVFILKGNALADKLATQGSYVVNAGKRTADGSEFEKRTADGSEFESPKKKAKVE

SEQ ID NO: 7441 - protein, 2125 aa, synthetic construct
MPAAKRVKLDGGDKKYSIGLDIGTNSVGWAVITDEYKVPSKKFKVLGNTDRHSIKKNLIGALLFDSGETAEATRLKRTARRRYTRRKNRICYLQEIFSNEMAKVDDSFFHRLEESFLVEEDKKHERHPIFGNIVDEVAYHEKYPTIYHLRKKLVDSTDKADLRLIYLALAHMIKFRGHFLIEGDLNPDNSDVDKLFIQLVQTYNQLFEENPINASGVDAKAILSARLSKSRRLENLIAQLPGEKKNGLFGNLIALSLGLTPNFKSNFDLAEDAKLQLSKDTYDDDLDNLLAQIGDQYADLFLAAKNLSDAILLSDILRVNTEITKAPLSASMIKRYDEHHQDLTLLKALVRQQLPEKYKEIFFDQSKNGYAGYIDGGASQEEFYKFIKPILEKMDGTEELLVKLNREDLLRKQRTFDNGSIPHQIHLGELHAILRRQEDFYPFLKDNREKIEKILTFRIPYYVGPLARGNSRFAWMTRKSEETITPWNFEEVVDKGASAQSFIERMTNFDKNLPNEKVLPKHSLLYEYFTVYNELTKVKYVTEGMRKPAFLSGEQKKAIVDLLFKTNRKVTVKQLKEDYFKKIECFDSVEISGVEDRFNASLGTYHDLLKIIKDKDFLDNEENEDILEDIVLTLTLFEDREMIEERLKTYAHLFDDKVMKQLKRRRYTGWGRLSRKLINGIRDKQSGKTILDFLKSDGFANRNFMQLIHDDSLTFKEDIQKAQVSGQGDSLHEHIANLAGSPAIKKGILQTVKVVDELVKVMGRHKPENIVIEMARENQTTQKGQKNSRERMKRIEEGIKELGSQILKEHPVENTQLQNEKLYLYYLQNGRDMYVDQELDINRLSDYDVDHIVPQSFLKDDSIDNKVLTRSDKARGKSDNVPSEEVVKKMKNYWRQLLNAKLITQRKFDNLTKAERGGLSELDKAGFIKRQLVETRQITKHVAQILDSRMNTKYDENDKLIREVKVITLKSKLVSDFRKDFQFYKVREINNYHHAHDAYLNAVVGTALIKKYPKLESEFVYGDYKVYDVRKMIAKSEQEIGKATAKYFFYSNIMNFFKTEITLANGEIRKRPLIETNGETGEIVWDKGRDFATVRKVLSMPQVNIVKKTEVQTGGFSKESILPKRNSDKLIARKKDWDPKKYGGFDSPTVAYSVLVVAKVEKGKSKKLKSVKELLGITIMERSSFEKNPIDFLEAKGYKEVKKDLIIKLPKYSLFELENGRKRMLASAGELQKGNELALPSKYVNFLYLASHYEKLKGSPEDNEQKQLFVEQHKHYLDEIIEQISEFSKRVILADANLDKVLSAYNKHRDKPIREQAENIIHLFTLTNLGAPAAFKYFDTTIDRKRYTSTKEVLDATLIHQSITGLYETRIDLSQLGGDGGPAPGSSGGGGGLLGRDLLTKLKAQIQFSTEGPQVTWEDRPAMCLVLNLEEEYRLHEKPVPPSIDPSWLQLFPMVWAEKAGMGLANQVPPVVVELKSDASPVAVRQYPMSKEAREGIRPHIQRFLDLGILVPCQSPWNTPLLPVKKPGTNDYRPVQDLREVNKRVQDIHPTVPNPYNLLSSLPPSHTWYSVLDLKDAFFCLKLHPNSQPLFAFEWRDPEKGNTGQLTWTRLPQGFKNSPTLFNEALHRDLASFRALNPQVVMLQYVDDLLVAAPTYRDCKEGTRRLLQELSKLGYRVSAKKAQLCREEVTYLGYLLKGGKRWLTPARKATVMKIPTPTTPRQVREFLGTAGFCRLWIPGFASLAAPLYPLTRPKVPFTWTEAHQEAFGRIKEALLSAPALALPDLTKPFALYVDEKEGVARGVLTQTLGPWRRPVAYLSKKLDPVASGWPTCLKAIAAVALLLKDADKLTLGQNVLVIAPHNLESIVRQPPDRWMTNARMTHYQSLLLNERVSFAPPAILNPATLLPVESDDTPIHICSEILAEETGTRPDLRDQPLPGVPAWYTDGSSFIMDGRRQAGAAIVDNKRTVWASNLPEGTSAQKAELIALTQALRLAEGKSINIYTDSRYAFATAHVHGAIYKQRGWLTSAGKDIKNKEEILALLEAIHLPKRVAIIHCPGHQRGTDPVATGNRKADEAAKQAAQSTRILTETTKNAGKRTADGSEFEKRTADGSEFESPKKKAKVE

SEQ ID NO: 7442 - protein, 2094 aa, synthetic construct
MPAAKRVKLDGGDKKYSIGLDIGTNSVGWAVITDEYKVPSKKFKVLGNTDRHSIKKNLIGALLFDSGETAEATRLKRTARRRYTRRKNRICYLQEIFSNEMAKVDDSFFHRLEESFLVEEDKKHERHPIFGNIVDEVAYHEKYPTIYHLRKKLVDSTDKADLRLIYLALAHMIKFRGHFLIEGDLNPDNSDVDKLFIQLVQTYNQLFEENPINASGVDAKAILSARLSKSRRLENLIAQLPGEKKNGLFGNLIALSLGLTPNFKSNFDLAEDAKLQLSKDTYDDDLDNLLAQIGDQYADLFLAAKNLSDAILLSDILRVNTEITKAPLSASMIKRYDEHHQDLTLLKALVRQQLPEKYKEIFFDQSKNGYAGYIDGGASQEEFYKFIKPILEKMDGTEELLVKLNREDLLRKQRTFDNGSIPHQIHLGELHAILRRQEDFYPFLKDNREKIEKILTFRIPYYVGPLARGNSRFAWMTRKSEETITPWNFEEVVDKGASAQSFIERMTNFDKNLPNEKVLPKHSLLYEYFTVYNELTKVKYVTEGMRKPAFLSGEQKKAIVDLLFKTNRKVTVKQLKEDYFKKIECFDSVEISGVEDRFNASLGTYHDLLKIIKDKDFLDNEENEDILEDIVLTLTLFEDREMIEERLKTYAHLFDDKVMKQLKRRRYTGWGRLSRKLINGIRDKQSGKTILDFLKSDGFANRNFMQLIHDDSLTFKEDIQKAQVSGQGDSLHEHIANLAGSPAIKKGILQTVKVVDELVKVMGRHKPENIVIEMARENQTTQKGQKNSRERMKRIEEGIKELGSQILKEHPVENTQLQNEKLYLYYLQNGRDMYVDQELDINRLSDYDVDHIVPQSFLKDDSIDNKVLTRSDKARGKSDNVPSEEVVKKMKNYWRQLLNAKLITQRKFDNLTKAERGGLSELDKAGFIKRQLVETRQITKHVAQILDSRMNTKYDENDKLIREVKVITLKSKLVSDFRKDFQFYKVREINNYHHAHDAYLNAVVGTALIKKYPKLESEFVYGDYKVYDVRKMIAKSEQEIGKATAKYFFYSNIMNFFKTEITLANGEIRKRPLIETNGETGEIVWDKGRDFATVRKVLSMPQVNIVKKTEVQTGGFSKESILPKRNSDKLIARKKDWDPKKYGGFDSPTVAYSVLVVAKVEKGKSKKLKSVKELLGITIMERSSFEKNPIDFLEAKGYKEVKKDLIIKLPKYSLFELENGRKRMLASAGELQKGNELALPSKYVNFLYLASHYEKLKGSPEDNEQKQLFVEQHKHYLDEIIEQISEFSKRVILADANLDKVLSAYNKHRDKPIREQAENIIHLFTLTNLGAPAAFKYFDTTIDRKRYTSTKEVLDATLIHQSITGLYETRIDLSQLGGDGGPAPGSSGGGGGTLNLEDEYRLYETSAEPEVSPGSTWLSDFPQAWAETGGMGLAVRQAPLIIPLKATSTPVSIKQYPMSQEAKLGIKPHIQRLLDQGILVPCQSPWNTPLLPVKKPGTNDYRPVQDLREVNKRVEDIHPTVPNPYNLLSGLPPSHRWYTVLDLKDAFFCLRLHPTSQPLFAFEWRDPGMGISGQLTWTRLPQGFKNSPTLFNEALHRDLADFRIQHPDLILLQYVDDILLAATSELDCQQGTRALLLTLGNLGYRASAKKAQLCQKQVKYLGYLLKEGQRWLTEARKETVMGQPTPKTPRQLREFLGTAGFCRLWIPGFAEMAAPLYPLTKPGTLFNWGPDQQKAYQEIKQALLTAPALGLPDLTKPFELFVDEKQGYAKGVLTQKLGPWRRPVAYLSKKLDPVAAGWPPCLRMVAAIAVLRKDAGKLTMGQPLVILAPHAVEALVKQPPDRWLSNARMTHYQAMLLDTDRVQFGPVVALNPATLLPLPEEGAPHDCLEILAETHGTRPDLTDQPIPDADHTWYTDGSSFLQEGQRKAGAAVTTETEVIWARALPAGTSAQRAELIALTQALKMAEGKRLNVYTDSRYAFATAHIHGEIYRRRGWLTSEGREIKNKSEILALLKALFLPKRLSIIHCLGHQKGDSAEARGNRLADQAAREAAIKTPPDTSTLLAGKRTADGSEFEKRTADGSEFESPKKKAKVE

SEQ ID NO: 7443 - protein, 2094 aa, synthetic construct; identical to SEQ ID NO: 4533

SEQ ID NO: 7444 - protein, 2094 aa, synthetic construct
MPAAKRVKLDGGDKKYSIGLDIGTNSVGWAVITDEYKVPSKKFKVLGNTDRHSIKKNLIGALLFDSGETAEATRLKRTARRRYTRRKNRICYLQEIFSNEMAKVDDSFFHRLEESFLVEEDKKHERHPIFGNIVDEVAYHEKYPTIYHLRKKLVDSTDKADLRLIYLALAHMIKFRGHFLIEGDLNPDNSDVDKLFIQLVQTYNQLFEENPINASGVDAKAILSARLSKSRRLENLIAQLPGEKKNGLFGNLIALSLGLTPNFKSNFDLAEDAKLQLSKDTYDDDLDNLLAQIGDQYADLFLAAKNLSDAILLSDILRVNTEITKAPLSASMIKRYDEHHQDLTLLKALVRQQLPEKYKEIFFDQSKNGYAGYIDGGASQEEFYKFIKPILEKMDGTEELLVKLNREDLLRKQRTFDNGSIPHQIHLGELHAILRRQEDFYPFLKDNREKIEKILTFRIPYYVGPLARGNSRFAWMTRKSEETITPWNFEEVVDKGASAQSFIERMTNFDKNLPNEKVLPKHSLLYEYFTVYNELTKVKYVTEGMRKPAFLSGEQKKAIVDLLFKTNRKVTVKQLKEDYFKKIECFDSVEISGVEDRFNASLGTYHDLLKIIKDKDFLDNEENEDILEDIVLTLTLFEDREMIEERLKTYAHLFDDKVMKQLKRRRYTGWGRLSRKLINGIRDKQSGKTILDFLKSDGFANRNFMQLIHDDSLTFKEDIQKAQVSGQGDSLHEHIANLAGSPAIKKGILQTVKVVDELVKVMGRHKPENIVIEMARENQTTQKGQKNSRERMKRIEEGIKELGSQILKEHPVENTQLQNEKLYLYYLQNGRDMYVDQELDINRLSDYDVDHIVPQSFLKDDSIDNKVLTRSDKARGKSDNVPSEEVVKKMKNYWRQLLNAKLITQRKFDNLTKAERGGLSELDKAGFIKRQLVETRQITKHVAQILDSRMNTKYDENDKLIREVKVITLKSKLVSDFRKDFQFYKVREINNYHHAHDAYLNAVVGTALIKKYPKLESEFVYGDYKVYDVRKMIAKSEQEIGKATAKYFFYSNIMNFFKTEITLANGEIRKRPLIETNGETGEIVWDKGRDFATVRKVLSMPQVNIVKKTEVQTGGFSKESILPKRNSDKLIARKKDWDPKKYGGFDSPTVAYSVLVVAKVEKGKSKKLKSVKELLGITIMERSSFEKNPIDFLEAKGYKEVKKDLIIKLPKYSLFELENGRKRMLASAGELQKGNELALPSKYVNFLYLASHYEKLKGSPEDNEQKQLFVEQHKHYLDEIIEQISEFSKRVILADANLDKVLSAYNKHRDKPIREQAENIIHLFTLTNLGAPAAFKYFDTTIDRKRYTSTKEVLDATLIHQSITGLYETRIDLSQLGGDGGPAPGSSGGGGGTLNIEDEHRLHETSKEPDVSLGSTWLSDFPQAWAETGGMGLAVRQAPLIIPLKATSTPVSIKQYPMSQEARLGIKPHIQRLLDQGILVPCQSPWNTPLLPVKKPGTNDYRPVQDLREVNKRVEDIHPTVPNPYNLLSGLPPSHQWYTVLDLKDAFFCLRLHPTSQPLFAFEWRDPEMGISGQLTWTRLPQGFKNSPTLFNEALHRDLADFRIQHPDLILLQYVDDLLLAATSELDCQQGTRALLQTLGNLGYRASAKKAQICQKQVKYLGYLLKEGQRWLTEARKETVMGQPTPKTPRQLREFLGTAGFCRLWIPGFAEMAAPLYPLTKPGTLFNWGPDQQKAYQEIKQALLTAPALGLPDLTKPFELFVDEKQGYAKGVLTQKLGPWRRPVAYLSKKLDPVAAGWPPCLRMVAAIAVLTKDAGKLTMGQPLVILAPHAVEALVKQPPDRWLSNARMTHYQALLLDTDRVQFGPVVALNPATLLPLPEEGLQHNCLDILAEAHGTRPDLTDQPLPDADHTWYTDGSSLLQEGQRKAGAAVTTETEVIWAKALPAGTSAQRAELIALTQALKMAEGKKLNVYTDSRYAFATAHIHGEIYRRRGWLTSEGKEIKNKDEILALLKALFLPKRLSIIHCPGHQKGHSAEARGNRMADQAARKAAITETPDTSTLLAGKRTADGSEFEKRTADGSEFESPKKKAKVE

SEQ ID NO: 7445 - protein, 2094 aa, synthetic construct; identical to SEQ ID NO: 7444

SEQ ID NO: 7446 - protein, 2174 aa, synthetic construct
MPAAKRVKLDGGDKKYSIGLDIGTNSVGWAVITDEYKVPSKKFKVLGNTDRHSIKKNLIGALLFDSGETAEATRLKRTARRRYTRRKNRICYLQEIFSNEMAKVDDSFFHRLEESFLVEEDKKHERHPIFGNIVDEVAYHEKYPTIYHLRKKLVDSTDKADLRLIYLALAHMIKFRGHFLIEGDLNPDNSDVDKLFIQLVQTYNQLFEENPINASGVDAKAILSARLSKSRRLENLIAQLPGEKKNGLFGNLIALSLGLTPNFKSNFDLAEDAKLQLSKDTYDDDLDNLLAQIGDQYADLFLAAKNLSDAILLSDILRVNTEITKAPLSASMIKRYDEHHQDLTLLKALVRQQLPEKYKEIFFDQSKNGYAGYIDGGASQEEFYKFIKPILEKMDGTEELLVKLNREDLLRKQRTFDNGSIPHQIHLGELHAILRRQEDFYPFLKDNREKIEKILTFRIPYYVGPLARGNSRFAWMTRKSEETITPWNFEEVVDKGASAQSFIERMTNFDKNLPNEKVLPKHSLLYEYFTVYNELTKVKYVTEGMRKPAFLSGEQKKAIVDLLFKTNRKVTVKQLKEDYFKKIECFDSVEISGVEDRFNASLGTYHDLLKIIKDKDFLDNEENEDILEDIVLTLTLFEDREMIEERLKTYAHLFDDKVMKQLKRRRYTGWGRLSRKLINGIRDKQSGKTILDFLKSDGFANRNFMQLIHDDSLTFKEDIQKAQVSGQGDSLHEHIANLAGSPAIKKGILQTVKVVDELVKVMGRHKPENIVIEMARENQTTQKGQKNSRERMKRIEEGIKELGSQILKEHPVENTQLQNEKLYLYYLQNGRDMYVDQELDINRLSDYDVDHIVPQSFLKDDSIDNKVLTRSDKARGKSDNVPSEEVVKKMKNYWRQLLNAKLITQRKFDNLTKAERGGLSELDKAGFIKRQLVETRQITKHVAQILDSRMNTKYDENDKLIREVKVITLKSKLVSDFRKDFQFYKVREINNYHHAHDAYLNAVVGTALIKKYPKLESEFVYGDYKVYDVRKMIAKSEQEIGKATAKYFFYSNIMNFFKTEITLANGEIRKRPLIETNGETGEIVWDKGRDFATVRKVLSMPQVNIVKKTEVQTGGFSKESILPKRNSDKLIARKKDWDPKKYGGFDSPTVAYSVLVVAKVEKGKSKKLKSVKELLGITIMERSSFEKNPIDFLEAKGYKEVKKDLIIKLPKYSLFELENGRKRMLASAGELQKGNELALPSKYVNFLYLASHYEKLKGSPEDNEQKQLFVEQHKHYLDEIIEQISEFSKRVILADANLDKVLSAYNKHRDKPIREQAENIIHLFTLTNLGAPAAFKYFDTTIDRKRYTSTKEVLDATLIHQSITGLYETRIDLSQLGGDGGPAPGSSGGGGGMDPLQLLQPLEAEIKGTKLKAHWNSGATITCVPQAFLEEEVPIKNIWIKTIHGEKEQPVYYLTFKIQGRKVEAEVISSPYDYILVSPSDIPWLMKKPLQLTTLVPLQEYEERLLKQTMLTGSYKEKLQSLFLKYDALWQHWENQVGHRRIKPHHIATGTVNPRPQKQYPINPKAKASIQTVINDLLKQGVLIQQNSIMNTPVYPVPKPDGKWRMVLDYREVNKTIPLIAAQNQHSAGILSSIFRGKYKTTLDLSNGFWAHSITPESYWLTAFTWLGQQYCWTRLPQGFLNSPALFNADVVDLLKEVPNVQVYVDDIYISHDDPREHLEQLEKVFSLLLNAGYVVSLKKSEIAQHEVEFLGFNITKEGRGLTETFKQKLLNITPPRDLKQLQSILGKLNFARNFIPNFSELVKPLYNIIATAPGKYITWTTDNSQQLQNIISMLNSAENLEERNPEVRLIMKVNTSPSAGYIRFYNEFAKRPIMYLNYVYTKAEVKFTNTEKLLTTIHKGLIKALDLGMGQEILVYSPIVSMTKIQKTPLPERKALPIRWITWMSYLEDPRIQFHYDKTLPELQQVPTVTDDIIAKIKHPSEFSMVFYTDGSAIKHPNVNKSHNAGMGIAQVQFKPEFTVINTWSIPLGDHTAQLAEVAAVEFACKKALKIDGPVLIVTDSFYVAESVNKELPYWQSNGFFNNKKKPLKHVSKWKSIADCIQLKPDIIIIHEKGHQPTASTFHTEGNNLADKLATQGSYVVNAGKRTADGSEFEKRTADGSEFESPKKKAKVE

SEQ ID NO: 7447 - protein, 2094 aa, synthetic construct
MPAAKRVKLDGGDKKYSIGLDIGTNSVGWAVITDEYKVPSKKFKVLGNTDRHSIKKNLIGALLFDSGETAEATRLKRTARRRYTRRKNRICYLQEIFSNEMAKVDDSFFHRLEESFLVEEDKKHERHPIFGNIVDEVAYHEKYPTIYHLRKKLVDSTDKADLRLIYLALAHMIKFRGHFLIEGDLNPDNSDVDKLFIQLVQTYNQLFEENPINASGVDAKAILSARLSKSRRLENLIAQLPGEKKNGLFGNLIALSLGLTPNFKSNFDLAEDAKLQLSKDTYDDDLDNLLAQIGDQYADLFLAAKNLSDAILLSDILRVNTEITKAPLSASMIKRYDEHHQDLTLLKALVRQQLPEKYKEIFFDQSKNGYAGYIDGGASQEEFYKFIKPILEKMDGTEELLVKLNREDLLRKQRTFDNGSIPHQIHLGELHAILRRQEDFYPFLKDNREKIEKILTFRIPYYVGPLARGNSRFAWMTRKSEETITPWNFEEVVDKGASAQSFIERMTNFDKNLPNEKVLPKHSLLYEYFTVYNELTKVKYVTEGMRKPAFLSGEQKKAIVDLLFKTNRKVTVKQLKEDYFKKIECFDSVEISGVEDRFNASLGTYHDLLKIIKDKDFLDNEENEDILEDIVLTLTLFEDREMIEERLKTYAHLFDDKVMKQLKRRRYTGWGRLSRKLINGIRDKQSGKTILDFLKSDGFANRNFMQLIHDDSLTFKEDIQKAQVSGQGDSLHEHIANLAGSPAIKKGILQTVKVVDELVKVMGRHKPENIVIEMARENQTTQKGQKNSRERMKRIEEGIKELGSQILKEHPVENTQLQNEKLYLYYLQNGRDMYVDQELDINRLSDYDVDHIVPQSFLKDDSIDNKVLTRSDKARGKSDNVPSEEVVKKMKNYWRQLLNAKLITQRKFDNLTKAERGGLSELDKAGFIKRQLVETRQITKHVAQILDSRMNTKYDENDKLIREVKVITLKSKLVSDFRKDFQFYKVREINNYHHAHDAYLNAVVGTALIKKYPKLESEFVYGDYKVYDVRKMIAKSEQEIGKATAKYFFYSNIMNFFKTEITLANGEIRKRPLIETNGETGEIVWDKGRDFATVRKVLSMPQVNIVKKTEVQTGGFSKESILPKRNSDKLIARKKDWDPKKYGGFDSPTVAYSVLVVAKVEKGKSKKLKSVKELLGITIMERSSFEKNPIDFLEAKGYKEVKKDLIIKLPKYSLFELENGRKRMLASAGELQKGNELALPSKYVNFLYLASHYEKLKGSPEDNEQKQLFVEQHKHYLDEIIEQISEFSKRVILADANLDKVLSAYNKHRDKPIREQAENIIHLFTLTNLGAPAAFKYFDTTIDRKRYTSTKEVLDATLIHQSITGLYETRIDLSQLGGDGGPAPGSSGGGGGTLNIEDEYRLHETSKEPDVPLGSTWLSDFPQAWAETGGMGLAVRQAPLIIPLKATSTPVSIKQYPMSQEARLGIKPHIQRLLDQGILVPCQSPWNTPLLPVKKPGTNDYRPVQDLREVNKRVEDIHPTVPNPYNLLSGLPPSHQWYTVLDLKDAFFCLRLHPTSQPLFAFEWRDPEMGISGQLTWTRLPQGFKNSPTLFNEALHRDLADFRIQHPDLILLQYVDDLLLAATSEQDCQRGTRALLQTLGNLGYRASAKKAQICQKQVKYLGYLLKEGQRWLTEARKETVMGQPTPKTPRQLREFLGTAGFCRLWIPGFAEMAAPLYPLTKPGTLFNWGPDQQKAYQEIKQALLTAPALGLPDLTKPFELFVDEKQGYAKGVLTQKLGPWRRPVAYLSKKLDPVAAGWPPCLRMVAAIAVLTKDAGKLTMGQPLVILAPHAVEALVKQPPDRWLSNARMTHYQAMLLDTDRVQFGPVVALNPATLLPLPEKEAPHDCLEILAETHGTRPDLTDQPIPDADYTWYTDGSSFLQEGQRRAGAAVTTETEVIWARALPAGTSAQRAELIALTQALKMAEGKKLNVYTDSRYAFATAHVHGEIYRRRGWLTSEGREIKNKNEILALLKALFLPKRLSIIHCPGHQKGNSAEARGNRMADQAAREAAMKAVLETSTLLAGKRTADGSEFEKRTADGSEFESPKKKAKVE

SEQ ID NO: 7448 - protein, 2087 aa, synthetic construct
MPAAKRVKLDGGDKKYSIGLDIGTNSVGWAVITDEYKVPSKKFKVLGNTDRHSIKKNLIGALLFDSGETAEATRLKRTARRRYTRRKNRICYLQEIFSNEMAKVDDSFFHRLEESFLVEEDKKHERHPIFGNIVDEVAYHEKYPTIYHLRKKLVDSTDKADLRLIYLALAHMIKFRGHFLIEGDLNPDNSDVDKLFIQLVQTYNQLFEENPINASGVDAKAILSARLSKSRRLENLIAQLPGEKKNGLFGNLIALSLGLTPNFKSNFDLAEDAKLQLSKDTYDDDLDNLLAQIGDQYADLFLAAKNLSDAILLSDILRVNTEITKAPLSASMIKRYDEHHQDLTLLKALVRQQLPEKYKEIFFDQSKNGYAGYIDGGASQEEFYKFIKPILEKMDGTEELLVKLNREDLLRKQRTFDNGSIPHQIHLGELHAILRRQEDFYPFLKDNREKIEKILTFRIPYYVGPLARGNSRFAWMTRKSEETITPWNFEEVVDKGASAQSFIERMTNFDKNLPNEKVLPKHSLLYEYFTVYNELTKVKYVTEGMRKPAFLSGEQKKAIVDLLFKTNRKVTVKQLKEDYFKKIECFDSVEISGVEDRFNASLGTYHDLLKIIKDKDFLDNEENEDILEDIVLTLTLFEDREMIEERLKTYAHLFDDKVMKQLKRRRYTGWGRLSRKLINGIRDKQSGKTILDFLKSDGFANRNFMQLIHDDSLTFKEDIQKAQVSGQGDSLHEHIANLAGSPAIKKGILQTVKVVDELVKVMGRHKPENIVIEMARENQTTQKGQKNSRERMKRIEEGIKELGSQILKEHPVENTQLQNEKLYLYYLQNGRDMYVDQELDINRLSDYDVDHIVPQSFLKDDSIDNKVLTRSDKARGKSDNVPSEEVVKKMKNYWRQLLNAKLITQRKFDNLTKAERGGLSELDKAGFIKRQLVETRQITKHVAQILDSRMNTKYDENDKLIREVKVITLKSKLVSDFRKDFQFYKVREINNYHHAHDAYLNAVVGTALIKKYPKLESEFVYGDYKVYDVRKMIAKSEQEIGKATAKYFFYSNIMNFFKTEITLANGEIRKRPLIETNGETGEIVWDKGRDFATVRKVLSMPQVNIVKKTEVQTGGFSKESILPKRNSDKLIARKKDWDPKKYGGFDSPTVAYSVLVVAKVEKGKSKKLKSVKELLGITIMERSSFEKNPIDFLEAKGYKEVKKDLIIKLPKYSLFELENGRKRMLASAGELQKGNELALPSKYVNFLYLASHYEKLKGSPEDNEQKQLFVEQHKHYLDEIIEQISEFSKRVILADANLDKVLSAYNKHRDKPIREQAENIIHLFTLTNLGAPAAFKYFDTTIDRKRYTSTKEVLDATLIHQSITGLYETRIDLSQLGGDGGGGGEAAAKPAPGGVPWILKKPLELTIKLDLEEQQGTLLNNSILSKKGKEELKQLFEKYSALWQSWENQVGHRRIRPHKIATGTVKPTPQKQYHINPKAKPDIQIVINDLLKQGVLIQKESTMNTPVYPVPKPNGRWRMVLDYRAVNKVTPLIAVQNQHSYGILGSLFKGRYKTTIDLSNGFWAHPIVPEDYWITAFTWQGKQYCWTVLPQGFLNSPGLFTGDVVDLLQGIPNVEVYVDDVYISHDSEKEHLEYLDILFNRLKEAGYIISLKKSNIANSIVDFLGFQITNEGRGLTDTFKEKLENITAPTTLKQLQSILGLLNFARNFIPDFTELIAPLYALIPKSTKNYVPWQIEHSTTLETLITKLNGAEYLQGRKGDKTLIMKVNASYTTGYIRYYNEGEKKPISYVSIVFSKTELKFTELEKLLTTVHKGLLKALDLSMGQNIHVYSPIVSMQNIQKTPQTAKKALASRWLSWLSYLEDPRIRFFYDPQMPALKDLPAVDTGKDNKKHPSNFQHIFYTDGSAITSPTKEGHLNAGMGIVYFINKDGNLQKQQEWSISLGNHTAQFAEIAAFEFALKKCLPLGGNILVVTDSNYVAKAYNEELDVWASNGFVNNRKKPLKHISKWKSVADLKRLRPDVVVTHEPGHQKLDSSPHAYGNNLADQLATQASFKVHAGKRTADGSEFEKRTADGSEFESPKKKAKVE

SEQ ID NO: 7449 - protein, 2087 aa, synthetic construct
MPAAKRVKLDGGDKKYSIGLDIGTNSVGWAVITDEYKVPSKKFKVLGNTDRHSIKKNLIGALLFDSGETAEATRLKRTARRRYTRRKNRICYLQEIFSNEMAKVDDSFFHRLEESFLVEEDKKHERHPIFGNIVDEVAYHEKYPTIYHLRKKLVDSTDKADLRLIYLALAHMIKFRGHFLIEGDLNPDNSDVDKLFIQLVQTYNQLFEENPINASGVDAKAILSARLSKSRRLENLIAQLPGEKKNGLFGNLIALSLGLTPNFKSNFDLAEDAKLQLSKDTYDDDLDNLLAQIGDQYADLFLAAKNLSDAILLSDILRVNTEITKAPLSASMIKRYDEHHQDLTLLKALVRQQLPEKYKEIFFDQSKNGYAGYIDGGASQEEFYKFIKPILEKMDGTEELLVKLNREDLLRKQRTFDNGSIPHQIHLGELHAILRRQEDFYPFLKDNREKIEKILTFRIPYYVGPLARGNSRFAWMTRKSEETITPWNFEEVVDKGASAQSFIERMTNFDKNLPNEKVLPKHSLLYEYFTVYNELTKVKYVTEGMRKPAFLSGEQKKAIVDLLFKTNRKVTVKQLKEDYFKKIECFDSVEISGVEDRFNASLGTYHDLLKIIKDKDFLDNEENEDILEDIVLTLTLFEDREMIEERLKTYAHLFDDKVMKQLKRRRYTGWGRLSRKLINGIRDKQSGKTILDFLKSDGFANRNFMQLIHDDSLTFKEDIQKAQVSGQGDSLHEHIANLAGSPAIKKGILQTVKVVDELVKVMGRHKPENIVIEMARENQTTQKGQKNSRERMKRIEEGIKELGSQILKEHPVENTQLQNEKLYLYYLQNGRDMYVDQELDINRLSDYDVDHIVPQSFLKDDSIDNKVLTRSDKARGKSDNVPSEEVVKKMKNYWRQLLNAKLITQRKFDNLTKAERGGLSELDKAGFIKRQLVETRQITKHVAQILDSRMNTKYDENDKLIREVKVITLKSKLVSDFRKDFQFYKVREINNYHHAHDAYLNAVVGTALIKKYPKLESEFVYGDYKVYDVRKMIAKSEQEIGKATAKYFFYSNIMNFFKTEITLANGEIRKRPLIETNGETGEIVWDKGRDFATVRKVLSMPQVNIVKKTEVQTGGFSKESILPKRNSDKLIARKKDWDPKKYGGFDSPTVAYSVLVVAKVEKGKSKKLKSVKELLGITIMERSSFEKNPIDFLEAKGYKEVKKDLIIKLPKYSLFELENGRKRMLASAGELQKGNELALPSKYVNFLYLASHYEKLKGSPEDNEQKQLFVEQHKHYLDEIIEQISEFSKRVILADANLDKVLSAYNKHRDKPIREQAENIIHLFTLTNLGAPAAFKYFDTTIDRKRYTSTKEVLDATLIHQSITGLYETRIDLSQLGGDGGGGGEAAAKPAPGGVPWILKKPLELTIKLDLEEQQGTLLNNSILSKKGKEELKQLFEKYSALWQSWENQVGHRRIRPHKIATGTVKPTPQKQYHINPKAKPDIQIVINDLLKQGVLIQKESTMNTPVYPVPKPNGRWRMVLDYRAVNKVTPLIAVQNQHSYGILGSLFKGRYKTTIDLSNGFWAHPIVPEDYWITAFTWQGKQYCWTVLPQGFLNSPGLFNGDVVDLLQGIPNVEVYVDDVYISHDSEKEHLEYLDILFNRLKEAGYIISLKKSNIANSIVDFLGFQITNEGRGLTDTFKEKLENITAPTTLKQLQSILGLLNFARNFIPDFTELIAPLYALIPKSPKNYVPWQIEHSTTLETLITKLNGAEYLQGRKGDKTLIMKVNASYTTGYIRYYNEGEKKPISYVSIVFSKTELKFTELEKLLTTVHKGLLKALDLSMGQNIHVYSPIVSMQNIQKTPQTAKKALASRWLSWLSYLEDPRIRFFYDPQMPALKDLPAVDTGKDNKKHPSNFQHIFYTDGSAITSPTKEGHLNAGMGIVYFINKDGNLQKQQEWSISLGNHTAQFAEIAAFEFALKKCLPLGGNILVVTDSNYVAKAYNEELDVWASNGFVNNRKKPLKHISKWKSVADLKRLRPDVVVTHEPGHQKLDSSPHAYGNNLADQLATQASFKVHAGKRTADGSEFEKRTADGSEFESPKKKAKVE

SEQ ID NO: 7450 - protein, 2176 aa, synthetic construct
MPAAKRVKLDGGDKKYSIGLDIGTNSVGWAVITDEYKVPSKKFKVLGNTDRHSIKKNLIGALLFDSGETAEATRLKRTARRRYTRRKNRICYLQEIFSNEMAKVDDSFFHRLEESFLVEEDKKHERHPIFGNIVDEVAYHEKYPTIYHLRKKLVDSTDKADLRLIYLALAHMIKFRGHFLIEGDLNPDNSDVDKLFIQLVQTYNQLFEENPINASGVDAKAILSARLSKSRRLENLIAQLPGEKKNGLFGNLIALSLGLTPNFKSNFDLAEDAKLQLSKDTYDDDLDNLLAQIGDQYADLFLAAKNLSDAILLSDILRVNTEITKAPLSASMIKRYDEHHQDLTLLKALVRQQLPEKYKEIFFDQSKNGYAGYIDGGASQEEFYKFIKPILEKMDGTEELLVKLNREDLLRKQRTFDNGSIPHQIHLGELHAILRRQEDFYPFLKDNREKIEKILTFRIPYYVGPLARGNSRFAWMTRKSEETITPWNFEEVVDKGASAQSFIERMTNFDKNLPNEKVLPKHSLLYEYFTVYNELTKVKYVTEGMRKPAFLSGEQKKAIVDLLFKTNRKVTVKQLKEDYFKKIECFDSVEISGVEDRFNASLGTYHDLLKIIKDKDFLDNEENEDILEDIVLTLTLFEDREMIEERLKTYAHLFDDKVMKQLKRRRYTGWGRLSRKLINGIRDKQSGKTILDFLKSDGFANRNFMQLIHDDSLTFKEDIQKAQVSGQGDSLHEHIANLAGSPAIKKGILQTVKVVDELVKVMGRHKPENIVIEMARENQTTQKGQKNSRERMKRIEEGIKELGSQILKEHPVENTQLQNEKLYLYYLQNGRDMYVDQELDINRLSDYDVDHIVPQSFLKDDSIDNKVLTRSDKARGKSDNVPSEEVVKKMKNYWRQLLNAKLITQRKFDNLTKAERGGLSELDKAGFIKRQLVETRQITKHVAQILDSRMNTKYDENDKLIREVKVITLKSKLVSDFRKDFQFYKVREINNYHHAHDAYLNAVVGTALIKKYPKLESEFVYGDYKVYDVRKMIAKSEQEIGKATAKYFFYSNIMNFFKTEITLANGEIRKRPLIETNGETGEIVWDKGRDFATVRKVLSMPQVNIVKKTEVQTGGFSKESILPKRNSDKLIARKKDWDPKKYGGFDSPTVAYSVLVVAKVEKGKSKKLKSVKELLGITIMERSSFEKNPIDFLEAKGYKEVKKDLIIKLPKYSLFELENGRKRMLASAGELQKGNELALPSKYVNFLYLASHYEKLKGSPEDNEQKQLFVEQHKHYLDEIIEQISEFSKRVILADANLDKVLSAYNKHRDKPIREQAENIIHLFTLTNLGAPAAFKYFDTTIDRKRYTSTKEVLDATLIHQSITGLYETRIDLSQLGGDGGGGGEAAAKPAPGGMNPLQLLQPLPAEIKGTKLLAHWNSGATITCIPESFLEDEQPIKKTLIKTIHGEKQQNVYYVTFKVKGRKVEAEVIASPYEYILLSPTDVPWLTQQPLQLTILVPLQEYQEKILSKTALPEDQKQQLKTLFVKYDNLWQHWENQVGHRKIRPHNIATGDYPPRPQKQYPINPKAKPSIQIVIDDLLKQGVLTPQNSTMNTPVYPVPKPDGRWRMVLDYREVNKTIPLTAAQNQHSAGILATIVRQKYKTTLDLANGFWAHPITPESYWLTAFTWQGKQYCWTRLPQGFLNSPALFNADVVDLLKEIPNVQVYVDDIYLSHDDPKEHVQQLEKVFQILLQAGYVVSLKKSEIGQKTVEFLGFNITKEGRGLTDTFKTKLLNITPPKDLKQLQSILGKLNFARNFIPNFAELVQPLYNLIAPAKGKYIEWSEENTKQLNMVIEALNTASNLEERLPEQRLVIKVNTSPSAGYVRYYNETGKKPIMYLNYVFSKAELKFSMLEKLLTTMHKALIKAMDLAMGQEILVYSPIVSMTKIQKTPLPERKALPIRWITWMTYLEDPRIQFHYDKTLPELKHIPDVYTSSQSPVKHPSQYEGVFYTDGSAIKSPDPTKSNNAGMGIVHATYKPEYQVLNQWSIPLGNHTAQMAEIAAVEFACKKALKIPGPVLVITDSFYVAESANKELPYWKSNGFVNNKKKPLKHISKWKSIAECLSMKPDITIQHEKGISLQIPVFILKGNALADKLATQGSYVVNAGKRTADGSEFEKRTADGSEFESPKKKAKVE

SEQ ID NO: 7451 - protein, 2127 aa, synthetic construct
MPAAKRVKLDGGDKKYSIGLDIGTNSVGWAVITDEYKVPSKKFKVLGNTDRHSIKKNLIGALLFDSGETAEATRLKRTARRRYTRRKNRICYLQEIFSNEMAKVDDSFFHRLEESFLVEEDKKHERHPIFGNIVDEVAYHEKYPTIYHLRKKLVDSTDKADLRLIYLALAHMIKFRGHFLIEGDLNPDNSDVDKLFIQLVQTYNQLFEENPINASGVDAKAILSARLSKSRRLENLIAQLPGEKKNGLFGNLIALSLGLTPNFKSNFDLAEDAKLQLSKDTYDDDLDNLLAQIGDQYADLFLAAKNLSDAILLSDILRVNTEITKAPLSASMIKRYDEHHQDLTLLKALVRQQLPEKYKEIFFDQSKNGYAGYIDGGASQEEFYKFIKPILEKMDGTEELLVKLNREDLLRKQRTFDNGSIPHQIHLGELHAILRRQEDFYPFLKDNREKIEKILTFRIPYYVGPLARGNSRFAWMTRKSEETITPWNFEEVVDKGASAQSFIERMTNFDKNLPNEKVLPKHSLLYEYFTVYNELTKVKYVTEGMRKPAFLSGEQKKAIVDLLFKTNRKVTVKQLKEDYFKKIECFDSVEISGVEDRFNASLGTYHDLLKIIKDKDFLDNEENEDILEDIVLTLTLFEDREMIEERLKTYAHLFDDKVMKQLKRRRYTGWGRLSRKLINGIRDKQSGKTILDFLKSDGFANRNFMQLIHDDSLTFKEDIQKAQVSGQGDSLHEHIANLAGSPAIKKGILQTVKVVDELVKVMGRHKPENIVIEMARENQTTQKGQKNSRERMKRIEEGIKELGSQILKEHPVENTQLQNEKLYLYYLQNGRDMYVDQELDINRLSDYDVDHIVPQSFLKDDSIDNKVLTRSDKARGKSDNVPSEEVVKKMKNYWRQLLNAKLITQRKFDNLTKAERGGLSELDKAGFIKRQLVETRQITKHVAQILDSRMNTKYDENDKLIREVKVITLKSKLVSDFRKDFQFYKVREINNYHHAHDAYLNAVVGTALIKKYPKLESEFVYGDYKVYDVRKMIAKSEQEIGKATAKYFFYSNIMNFFKTEITLANGEIRKRPLIETNGETGEIVWDKGRDFATVRKVLSMPQVNIVKKTEVQTGGFSKESILPKRNSDKLIARKKDWDPKKYGGFDSPTVAYSVLVVAKVEKGKSKKLKSVKELLGITIMERSSFEKNPIDFLEAKGYKEVKKDLIIKLPKYSLFELENGRKRMLASAGELQKGNELALPSKYVNFLYLASHYEKLKGSPEDNEQKQLFVEQHKHYLDEIIEQISEFSKRVILADANLDKVLSAYNKHRDKPIREQAENIIHLFTLTNLGAPAAFKYFDTTIDRKRYTSTKEVLDATLIHQSITGLYETRIDLSQLGGDGGGGGEAAAKPAPGGLLGRDLLTKLKAQIQFSTEGPQVTWEDRPAMCLVLNLEEEYRLHEKPVPPSIDPSWLQLFPMVWAEKAGMGLANQVPPVVVELKSDASPVAVRQYPMSKEAREGIRPHIQRFLDLGILVPCQSPWNTPLLPVKKPGTNDYRPVQDLREVNKRVQDIHPTVPNPYNLLSSLPPSHTWYSVLDLKDAFFCLKLHPNSQPLFAFEWRDPEKGNTGQLTWTRLPQGFKNSPTLFNEALHRDLASFRALNPQVVMLQYVDDLLVAAPTYRDCKEGTRRLLQELSKLGYRVSAKKAQLCREEVTYLGYLLKGGKRWLTPARKATVMKIPTPTTPRQVREFLGTAGFCRLWIPGFASLAAPLYPLTRPKVPFTWTEAHQEAFGRIKEALLSAPALALPDLTKPFALYVDEKEGVARGVLTQTLGPWRRPVAYLSKKLDPVASGWPTCLKAIAAVALLLKDADKLTLGQNVLVIAPHNLESIVRQPPDRWMTNARMTHYQSLLLNERVSFAPPAILNPATLLPVESDDTPIHICSEILAEETGTRPDLRDQPLPGVPAWYTDGSSFIMDGRRQAGAAIVDNKRTVWASNLPEGTSAQKAELIALTQALRLAEGKSINIYTDSRYAFATAHVHGAIYKQRGWLTSAGKDIKNKEEILALLEAIHLPKRVAIIHCPGHQRGTDPVATGNRKADEAAKQAAQSTRILTETTKNAGKRTADGSEFEKRTADGSEFESPKKKAKVE

SEQ ID NO: 7452 - protein, 2096 aa, synthetic construct
MPAAKRVKLDGGDKKYSIGLDIGTNSVGWAVITDEYKVPSKKFKVLGNTDRHSIKKNLIGALLFDSGETAEATRLKRTARRRYTRRKNRICYLQEIFSNEMAKVDDSFFHRLEESFLVEEDKKHERHPIFGNIVDEVAYHEKYPTIYHLRKKLVDSTDKADLRLIYLALAHMIKFRGHFLIEGDLNPDNSDVDKLFIQLVQTYNQLFEENPINASGVDAKAILSARLSKSRRLENLIAQLPGEKKNGLFGNLIALSLGLTPNFKSNFDLAEDAKLQLSKDTYDDDLDNLLAQIGDQYADLFLAAKNLSDAILLSDILRVNTEITKAPLSASMIKRYDEHHQDLTLLKALVRQQLPEKYKEIFFDQSKNGYAGYIDGGASQEEFYKFIKPILEKMDGTEELLVKLNREDLLRKQRTFDNGSIPHQIHLGELHAILRRQEDFYPFLKDNREKIEKILTFRIPYYVGPLARGNSRFAWMTRKSEETITPWNFEEVVDKGASAQSFIERMTNFDKNLPNEKVLPKHSLLYEYFTVYNELTKVKYVTEGMRKPAFLSGEQKKAIVDLLFKTNRKVTVKQLKEDYFKKIECFDSVEISGVEDRFNASLGTYHDLLKIIKDKDFLDNEENEDILEDIVLTLTLFEDREMIEERLKTYAHLFDDKVMKQLKRRRYTGWGRLSRKLINGIRDKQSGKTILDFLKSDGFANRNFMQLIHDDSLTFKEDIQKAQVSGQGDSLHEHIANLAGSPAIKKGILQTVKVVDELVKVMGRHKPENIVIEMARENQTTQKGQKNSRERMKRIEEGIKELGSQILKEHPVENTQLQNEKLYLYYLQNGRDMYVDQELDINRLSDYDVDHIVPQSFLKDDSIDNKVLTRSDKARGKSDNVPSEEVVKKMKNYWRQLLNAKLITQRKFDNLTKAERGGLSELDKAGFIKRQLVETRQITKHVAQILDSRMNTKYDENDKLIREVKVITLKSKLVSDFRKDFQFYKVREINNYHHAHDAYLNAVVGTALIKKYPKLESEFVYGDYKVYDVRKMIAKSEQEIGKATAKYFFYSNIMNFFKTEITLANGEIRKRPLIETNGETGEIVWDKGRDFATVRKVLSMPQVNIVKKTEVQTGGFSKESILPKRNSDKLIARKKDWDPKKYGGFDSPTVAYSVLVVAKVEKGKSKKLKSVKELLGITIMERSSFEKNPIDFLEAKGYKEVKKDLIIKLPKYSLFELENGRKRMLASAGELQKGNELALPSKYVNFLYLASHYEKLKGSPEDNEQKQLFVEQHKHYLDEIIEQISEFSKRVILADANLDKVLSAYNKHRDKPIREQAENIIHLFTLTNLGAPAAFKYFDTTIDRKRYTSTKEVLDATLIHQSITGLYETRIDLSQLGGDGGGGGEAAAKPAPGGTLGIEDEYRLHETSTEPDVSLGSTWLSDFPQAWAETGGMGLAVRQAPLIIPLKATSTPVSIQQYPMSHEARLGIKPHIQRLLDQGILVPCQSPWNTPLLPVKKPGTNDYRPVQDLREVNKRVEDIHPTVPNPYNLLSGLPPSHQWYTVLDLKDAFFCLRLHPTSQPLFAFEWRDPGMGISGQLTWTRLPQGFKNSPTLFDEALHRDLADFRIQHPDLILLQYVDDILLAATSELDCQQGTRALLQTLGDLGYRASAKKAQICQKQVKYLGYLLREGQRWLTEARKETVMGQPVPKTPRQLREFLGTAGFCRLWIPGFAEMAAPLYPLTKTGTLFSWGPDQQKAYQEIKQALLTAPALGLPDLTKPFELFVDEKQGYAKGVLTQKLGPWRRPVAYLSKKLDPVAAGWPPCLRMVAAIAVLTKDAGKLTMGQPLVILAPHAVEALVKQPPDRWLSNARMTHYQAMLLDTDRVQFGPVVALNPATLLPLPEEGAPHDCLEILAETHGTRPDLTDQPIPDADHTWYTDGSSFLQEGQRKAGAAVTTETEVIWAGALPAGTSAQRAELIALTQALKMAEGKRLNVYTDSRYAFATAHIHGEIYRRRGLLTSEGREIKNKSEILALLKALFLPKRLSIIHCLGHQKGDSAEARGNRLADQAAREAAIKTPPDTSTLLAGKRTADGSEFEKRTADGSEFESPKKKAKVE

SEQ ID NO: 7453 - protein, 2096 aa, synthetic construct
MPAAKRVKLDGGDKKYSIGLDIGTNSVGWAVITDEYKVPSKKFKVLGNTDRHSIKKNLIGALLFDSGETAEATRLKRTARRRYTRRKNRICYLQEIFSNEMAKVDDSFFHRLEESFLVEEDKKHERHPIFGNIVDEVAYHEKYPTIYHLRKKLVDSTDKADLRLIYLALAHMIKFRGHFLIEGDLNPDNSDVDKLFIQLVQTYNQLFEENPINASGVDAKAILSARLSKSRRLENLIAQLPGEKKNGLFGNLIALSLGLTPNFKSNFDLAEDAKLQLSKDTYDDDLDNLLAQIGDQYADLFLAAKNLSDAILLSDILRVNTEITKAPLSASMIKRYDEHHQDLTLLKALVRQQLPEKYKEIFFDQSKNGYAGYIDGGASQEEFYKFIKPILEKMDGTEELLVKLNREDLLRKQRTFDNGSIPHQIHLGELHAILRRQEDFYPFLKDNREKIEKILTFRIPYYVGPLARGNSRFAWMTRKSEETITPWNFEEVVDKGASAQSFIERMTNFDKNLPNEKVLPKHSLLYEYFTVYNELTKVKYVTEGMRKPAFLSGEQKKAIVDLLFKTNRKVTVKQLKEDYFKKIECFDSVEISGVEDRFNASLGTYHDLLKIIKDKDFLDNEENEDILEDIVLTLTLFEDREMIEERLKTYAHLFDDKVMKQLKRRRYTGWGRLSRKLINGIRDKQSGKTILDFLKSDGFANRNFMQLIHDDSLTFKEDIQKAQVSGQGDSLHEHIANLAGSPAIKKGILQTVKVVDELVKVMGRHKPENIVIEMARENQTTQKGQKNSRERMKRIEEGIKELGSQILKEHPVENTQLQNEKLYLYYLQNGRDMYVDQELDINRLSDYDVDHIVPQSFLKDDSIDNKVLTRSDKARGKSDNVPSEEVVKKMKNYWRQLLNAKLITQRKFDNLTKAERGGLSELDKAGFIKRQLVETRQITKHVAQILDSRMNTKYDENDKLIREVKVITLKSKLVSDFRKDFQFYKVREINNYHHAHDAYLNAVVGTALIKKYPKLESEFVYGDYKVYDVRKMIAKSEQEIGKATAKYFFYSNIMNFFKTEITLANGEIRKRPLIETNGETGEIVWDKGRDFATVRKVLSMPQVNIVKKTEVQTGGFSKESILPKRNSDKLIARKKDWDPKKYGGFDSPTVAYSVLVVAKVEKGKSKKLKSVKELLGITIMERSSFEKNPIDFLEAKGYKEVKKDLIIKLPKYSLFELENGRKRMLASAGELQKGNELALPSKYVNFLYLASHYEKLKGSPEDNEQKQLFVEQHKHYLDEIIEQISEFSKRVILADANLDKVLSAYNKHRDKPIREQAENIIHLFTLTNLGAPAAFKYFDTTIDRKRYTSTKEVLDATLIHQSITGLYETRIDLSQLGGDGGGGGEAAAKPAPGGTLGIEDEYRLHETSTEPDVSLGSTWLSDFPQAWAETGGMGLAVRQAPLIIPLKATSTPVSIQQYPMSHEARLGIKPHIQRLLDQGILVPCQSPWNTPLLPVKKPGTNDYRPVQDLREVNKRVEDIHPTVPNPYNLLSGLPPSHQWYTVLDLKDAFFCLRLHPTSQPLFAFEWRDPGMGISGQLTWTRLPQGFKNSPTLFNEALHRDLADFRIQHPDLILLQYVDDILLAATSELDCQQGTRALLQTLGDLGYRASAKKAQICQKQVKYLGYLLREGQRWLTEARKETVMGQPVPKTPRQLREFLGTAGFCRLWIPGFAEMAAPLYPLTKPGTLFSWGPDQQKAYQEIKQALLTAPALGLPDLTKPFELFVDEKQGYAKGVLTQKLGPWRRPVAYLSKKLDPVAAGWPPCLRMVAAIAVLTKDAGKLTMGQPLVILAPHAVEALVKQPPDRWLSNARMTHYQAMLLDTDRVQFGPVVALNPATLLPLPEEGAPHDCLEILAETHGTRPDLTDQPIPDADHTWYTDGSSFLQEGQRKAGAAVTTETEVIWAGALPAGTSAQRAELIALTQALKMAEGKRLNVYTDSRYAFATAHIHGEIYRRRGWLTSEGREIKNKSEILALLKALFLPKRLSIIHCLGHQKGDSAEARGNRLADQAAREAAIKTPPDTSTLLAGKRTADGSEFEKRTADGSEFESPKKKAKVE

SEQ ID NO: 7454 - protein, 2096 aa, synthetic construct
MPAAKRVKLDGGDKKYSIGLDIGTNSVGWAVITDEYKVPSKKFKVLGNTDRHSIKKNLIGALLFDSGETAEATRLKRTARRRYTRRKNRICYLQEIFSNEMAKVDDSFFHRLEESFLVEEDKKHERHPIFGNIVDEVAYHEKYPTIYHLRKKLVDSTDKADLRLIYLALAHMIKFRGHFLIEGDLNPDNSDVDKLFIQLVQTYNQLFEENPINASGVDAKAILSARLSKSRRLENLIAQLPGEKKNGLFGNLIALSLGLTPNFKSNFDLAEDAKLQLSKDTYDDDLDNLLAQIGDQYADLFLAAKNLSDAILLSDILRVNTEITKAPLSASMIKRYDEHHQDLTLLKALVRQQLPEKYKEIFFDQSKNGYAGYIDGGASQEEFYKFIKPILEKMDGTEELLVKLNREDLLRKQRTFDNGSIPHQIHLGELHAILRRQEDFYPFLKDNREKIEKILTFRIPYYVGPLARGNSRFAWMTRKSEETITPWNFEEVVDKGASAQSFIERMTNFDKNLPNEKVLPKHSLLYEYFTVYNELTKVKYVTEGMRKPAFLSGEQKKAIVDLLFKTNRKVTVKQLKEDYFKKIECFDSVEISGVEDRFNASLGTYHDLLKIIKDKDFLDNEENEDILEDIVLTLTLFEDREMIEERLKTYAHLFDDKVMKQLKRRRYTGWGRLSRKLINGIRDKQSGKTILDFLKSDGFANRNFMQLIHDDSLTFKEDIQKAQVSGQGDSLHEHIANLAGSPAIKKGILQTVKVVDELVKVMGRHKPENIVIEMARENQTTQKGQKNSRERMKRIEEGIKELGSQILKEHPVENTQLQNEKLYLYYLQNGRDMYVDQELDINRLSDYDVDHIVPQSFLKDDSIDNKVLTRSDKARGKSDNVPSEEVVKKMKNYWRQLLNAKLITQRKFDNLTKAERGGLSELDKAGFIKRQLVETRQITKHVAQILDSRMNTKYDENDKLIREVKVITLKSKLVSDFRKDFQFYKVREINNYHHAHDAYLNAVVGTALIKKYPKLESEFVYGDYKVYDVRKMIAKSEQEIGKATAKYFFYSNIMNFFKTEITLANGEIRKRPLIETNGETGEIVWDKGRDFATVRKVLSMPQVNIVKKTEVQTGGFSKESILPKRNSDKLIARKKDWDPKKYGGFDSPTVAYSVLVVAKVEKGKSKKLKSVKELLGITIMERSSFEKNPIDFLEAKGYKEVKKDLIIKLPKYSLFELENGRKRMLASAGELQKGNELALPSKYVNFLYLASHYEKLKGSPEDNEQKQLFVEQHKHYLDEIIEQISEFSKRVILADANLDKVLSAYNKHRDKPIREQAENIIHLFTLTNLGAPAAFKYFDTTIDRKRYTSTKEVLDATLIHQSITGLYETRIDLSQLGGDGGGGGEAAAKPAPGGTLNIEDEYRLHETSKGPDVPLGSTWLSDFPQAWAETGGMGLAVRQAPLIIPLKATSTPVSIKQYPMSQEARLGIKPHIQRLLDQGILVPCQSPWNTPLLPVKKPGTNDYRPVQDLREVNKRVEDIHPTVPNPYNLLSGLPPSHQWYTVLDLKDAFFCLRLHPTSQSLFAFEWRDPEMGISGQLTWTRLPQGFKNSPTLFNEALHRDLADFRIQHPDLILLQYVDDLLLAATSELDCQQGTRALLQTLGDLGYRASAKKAQICQKQVKYLGYLLKEGQRWLTEARKETVMGQPTPKTPRQLREFLGTAGFCRLWIPGFAEMAAPLYPLTKPGTLFEWGPDQQKAYQEIKQALLTAPALGLPDLTKPFELFVDEKQGYAKGVLTQKLGPWRRPVAYLSKKLDPVAAGWPPCLRMVAAIAVLTKDAGKLTMGQPLVILAPHAVEALVKQPPDRWLSNARMTHYQALLLDTDRVQFGPIVALNPATLLPLPEEGLQHDCLDILAEAHGTRPDLTDQPLPDADHTWYTDGSSFLQEGQRKAGAAVTTETEVVWAKALPAGTSAQRAELIALTQALKMAEGKKLNVYTDSRYAFATAHIHGEIYRRRGWLTSEGKEIKNKDEILALLKALFLPKRLSIIHCPGHQKGNRAEARGNRMADQAAREVATRETPETSTLLAGKRTADGSEFEKRTADGSEFESPKKKAKVE

SEQ ID NO: 7455 - protein, 2096 aa, synthetic construct
MPAAKRVKLDGGDKKYSIGLDIGTNSVGWAVITDEYKVPSKKFKVLGNTDRHSIKKNLIGALLFDSGETAEATRLKRTARRRYTRRKNRICYLQEIFSNEMAKVDDSFFHRLEESFLVEEDKKHERHPIFGNIVDEVAYHEKYPTIYHLRKKLVDSTDKADLRLIYLALAHMIKFRGHFLIEGDLNPDNSDVDKLFIQLVQTYNQLFEENPINASGVDAKAILSARLSKSRRLENLIAQLPGEKKNGLFGNLIALSLGLTPNFKSNFDLAEDAKLQLSKDTYDDDLDNLLAQIGDQYADLFLAAKNLSDAILLSDILRVNTEITKAPLSASMIKRYDEHHQDLTLLKALVRQQLPEKYKEIFFDQSKNGYAGYIDGGASQEEFYKFIKPILEKMDGTEELLVKLNREDLLRKQRTFDNGSIPHQIHLGELHAILRRQEDFYPFLKDNREKIEKILTFRIPYYVGPLARGNSRFAWMTRKSEETITPWNFEEVVDKGASAQSFIERMTNFDKNLPNEKVLPKHSLLYEYFTVYNELTKVKYVTEGMRKPAFLSGEQKKAIVDLLFKTNRKVTVKQLKEDYFKKIECFDSVEISGVEDRFNASLGTYHDLLKIIKDKDFLDNEENEDILEDIVLTLTLFEDREMIEERLKTYAHLFDDKVMKQLKRRRYTGWGRLSRKLINGIRDKQSGKTILDFLKSDGFANRNFMQLIHDDSLTFKEDIQKAQVSGQGDSLHEHIANLAGSPAIKKGILQTVKVVDELVKVMGRHKPENIVIEMARENQTTQKGQKNSRERMKRIEEGIKELGSQILKEHPVENTQLQNEKLYLYYLQNGRDMYVDQELDINRLSDYDVDHIVPQSFLKDDSIDNKVLTRSDKARGKSDNVPSEEVVKKMKNYWRQLLNAKLITQRKFDNLTKAERGGLSELDKAGFIKRQLVETRQITKHVAQILDSRMNTKYDENDKLIREVKVITLKSKLVSDFRKDFQFYKVREINNYHHAHDAYLNAVVGTALIKKYPKLESEFVYGDYKVYDVRKMIAKSEQEIGKATAKYFFYSNIMNFFKTEITLANGEIRKRPLIETNGETGEIVWDKGRDFATVRKVLSMPQVNIVKKTEVQTGGFSKESILPKRNSDKLIARKKDWDPKKYGGFDSPTVAYSVLVVAKVEKGKSKKLKSVKELLGITIMERSSFEKNPIDFLEAKGYKEVKKDLIIKLPKYSLFELENGRKRMLASAGELQKGNELALPSKYVNFLYLASHYEKLKGSPEDNEQKQLFVEQHKHYLDEIIEQISEFSKRVILADANLDKVLSAYNKHRDKPIREQAENIIHLFTLTNLGAPAAFKYFDTTIDRKRYTSTKEVLDATLIHQSITGLYETRIDLSQLGGDGGGGGEAAAKPAPGGTLNIEDEHRLHETSKEPDVSLGSTWLSDFPQAWAETGGMGLAVRQAPLIIPLKATSTPVSIKQYPMSQEARLGIKPHIQRLLDQGILVPCQSPWNTPLLPVKKPGTNDYRPVQDLREVNKRVEDIHPTVPNPYNLLSGLPPSHQWYTVLDLKDAFFCLRLHPTSQPLFAFEWRDPEMGISGQLTWTRLPQGFKNSPTLFDEALHRDLADFRIQHPDLILLQYVDDLLLAATSELDCQQGTRALLQTLGNLGYRASAKKAQICQKQVKYLGYLLKEGQRWLTEARKETVMGQPTPKTPRQLREFLGTAGFCRLWIPGFAEMAAPLYPLTKTGTLFNWGPDQQKAYQEIKQALLTAPALGLPDLTKPFELFVDEKQGYAKGVLTQKLGPWRRPVAYLSKKLDPVAAGWPPCLRMVAAIAVLTKDAGKLTMGQPLVILAPHAVEALVKQPPDRWLSNARMTHYQALLLDTDRVQFGPVVALNPATLLPLPEEGLQHNCLDILAEAHGTRPDLTDQPLPDADHTWYTDGSSLLQEGQRKAGAAVTTETEVIWAKALPAGTSAQRAELIALTQALKMAEGKKLNVYTDSRYAFATAHIHGEIYRRRGLLTSEGKEIKNKDEILALLKALFLPKRLSIIHCPGHQKGHSAEARGNRMADQAARKAAITETPDTSTLLAGKRTADGSEFEKRTADGSEFESPKKKAKVE

SEQ ID NO: 7456 - protein, 2087 aa, synthetic construct
MPAAKRVKLDGGDKKYSIGLDIGTNSVGWAVITDEYKVPSKKFKVLGNTDRHSIKKNLIGALLFDSGETAEATRLKRTARRRYTRRKNRICYLQEIFSNEMAKVDDSFFHRLEESFLVEEDKKHERHPIFGNIVDEVAYHEKYPTIYHLRKKLVDSTDKADLRLIYLALAHMIKFRGHFLIEGDLNPDNSDVDKLFIQLVQTYNQLFEENPINASGVDAKAILSARLSKSRRLENLIAQLPGEKKNGLFGNLIALSLGLTPNFKSNFDLAEDAKLQLSKDTYDDDLDNLLAQIGDQYADLFLAAKNLSDAILLSDILRVNTEITKAPLSASMIKRYDEHHQDLTLLKALVRQQLPEKYKEIFFDQSKNGYAGYIDGGASQEEFYKFIKPILEKMDGTEELLVKLNREDLLRKQRTFDNGSIPHQIHLGELHAILRRQEDFYPFLKDNREKIEKILTFRIPYYVGPLARGNSRFAWMTRKSEETITPWNFEEVVDKGASAQSFIERMTNFDKNLPNEKVLPKHSLLYEYFTVYNELTKVKYVTEGMRKPAFLSGEQKKAIVDLLFKTNRKVTVKQLKEDYFKKIECFDSVEISGVEDRFNASLGTYHDLLKIIKDKDFLDNEENEDILEDIVLTLTLFEDREMIEERLKTYAHLFDDKVMKQLKRRRYTGWGRLSRKLINGIRDKQSGKTILDFLKSDGFANRNFMQLIHDDSLTFKEDIQKAQVSGQGDSLHEHIANLAGSPAIKKGILQTVKVVDELVKVMGRHKPENIVIEMARENQTTQKGQKNSRERMKRIEEGIKELGSQILKEHPVENTQLQNEKLYLYYLQNGRDMYVDQELDINRLSDYDVDHIVPQSFLKDDSIDNKVLTRSDKARGKSDNVPSEEVVKKMKNYWRQLLNAKLITQRKFDNLTKAERGGLSELDKAGFIKRQLVETRQITKHVAQILDSRMNTKYDENDKLIREVKVITLKSKLVSDFRKDFQFYKVREINNYHHAHDAYLNAVVGTALIKKYPKLESEFVYGDYKVYDVRKMIAKSEQEIGKATAKYFFYSNIMNFFKTEITLANGEIRKRPLIETNGETGEIVWDKGRDFATVRKVLSMPQVNIVKKTEVQTGGFSKESILPKRNSDKLIARKKDWDPKKYGGFDSPTVAYSVLVVAKVEKGKSKKLKSVKELLGITIMERSSFEKNPIDFLEAKGYKEVKKDLIIKLPKYSLFELENGRKRMLASAGELQKGNELALPSKYVNFLYLASHYEKLKGSPEDNEQKQLFVEQHKHYLDEIIEQISEFSKRVILADANLDKVLSAYNKHRDKPIREQAENIIHLFTLTNLGAPAAFKYFDTTIDRKRYTSTKEVLDATLIHQSITGLYETRIDLSQLGGDGGGGGEAAAKPAPGGVPWLMKKPLQLTVLVPLHEYQERLLQQTALPKEQKELLQKLFLKYDALWQHWENQVGHRRIKPHNIATGTLAPRPQKQYPINPKAKPSIQIVIDDLLKQGVLIQQNSTMNTPVYPVPKPDGKWRMVLDYREVNKTIPLIAAQNQHSAGILSSIYRGKYKTTLDLTNGFWAHPITPESYWLTAFTWQGKQYCWTRLPQGFLNSPALFNADVVDLLKEIPNVQAYVDDIYISHDDPQEHLEQLEKIFSILLNAGYVVSLKKSEIAQREVEFLGFNITKEGRGLTDTFKQKLLNITPPKDLKQLQSILGKLNFARNFIPNYSELVKPLYTIVAPANGKFISWTEDNSNQLQHIISVLNQADNLEERNPETRLIIKVNSSPSAGYIRYYNEGSKRPIMYVNYIFSKAEAKFTQTEKLLTTMHKGLIKAMDLAMGQEILVYSPIVSMTKIQRTPLPERKALPVRWITWMTYLEDPRIQFHYDKSLPELQQIPNVTEDVIAKTKHPSEFAMVFYTDGSAIKHPDVNKSHSAGMGIAQVQFIPEYKIVHQWSIPLGDHTAQLAEIAAVEFACKKALKISGPVLIVTDSFYVAESANKELPYWKSNGFLNNKKKPLRHVSKWKSIAECLQLKPDIIIMHEKGHQQPMTTLHTEGNNLADKLATQGSYVVHAGKRTADGSEFEKRTADGSEFESPKKKAKVE

SEQ ID NO: 7457 - protein, 2087 aa, synthetic construct
MPAAKRVKLDGGDKKYSIGLDIGTNSVGWAVITDEYKVPSKKFKVLGNTDRHSIKKNLIGALLFDSGETAEATRLKRTARRRYTRRKNRICYLQEIFSNEMAKVDDSFFHRLEESFLVEEDKKHERHPIFGNIVDEVAYHEKYPTIYHLRKKLVDSTDKADLRLIYLALAHMIKFRGHFLIEGDLNPDNSDVDKLFIQLVQTYNQLFEENPINASGVDAKAILSARLSKSRRLENLIAQLPGEKKNGLFGNLIALSLGLTPNFKSNFDLAEDAKLQLSKDTYDDDLDNLLAQIGDQYADLFLAAKNLSDAILLSDILRVNTEITKAPLSASMIKRYDEHHQDLTLLKALVRQQLPEKYKEIFFDQSKNGYAGYIDGGASQEEFYKFIKPILEKMDGTEELLVKLNREDLLRKQRTFDNGSIPHQIHLGELHAILRRQEDFYPFLKDNREKIEKILTFRIPYYVGPLARGNSRFAWMTRKSEETITPWNFEEVVDKGASAQSFIERMTNFDKNLPNEKVLPKHSLLYEYFTVYNELTKVKYVTEGMRKPAFLSGEQKKAIVDLLFKTNRKVTVKQLKEDYFKKIECFDSVEISGVEDRFNASLGTYHDLLKIIKDKDFLDNEENEDILEDIVLTLTLFEDREMIEERLKTYAHLFDDKVMKQLKRRRYTGWGRLSRKLINGIRDKQSGKTILDFLKSDGFANRNFMQLIHDDSLTFKEDIQKAQVSGQGDSLHEHIANLAGSPAIKKGILQTVKVVDELVKVMGRHKPENIVIEMARENQTTQKGQKNSRERMKRIEEGIKELGSQILKEHPVENTQLQNEKLYLYYLQNGRDMYVDQELDINRLSDYDVDHIVPQSFLKDDSIDNKVLTRSDKARGKSDNVPSEEVVKKMKNYWRQLLNAKLITQRKFDNLTKAERGGLSELDKAGFIKRQLVETRQITKHVAQILDSRMNTKYDENDKLIREVKVITLKSKLVSDFRKDFQFYKVREINNYHHAHDAYLNAVVGTALIKKYPKLESEFVYGDYKVYDVRKMIAKSEQEIGKATAKYFFYSNIMNFFKTEITLANGEIRKRPLIETNGETGEIVWDKGRDFATVRKVLSMPQVNIVKKTEVQTGGFSKESILPKRNSDKLIARKKDWDPKKYGGFDSPTVAYSVLVVAKVEKGKSKKLKSVKELLGITIMERSSFEKNPIDFLEAKGYKEVKKDLIIKLPKYSLFELENGRKRMLASAGELQKGNELALPSKYVNFLYLASHYEKLKGSPEDNEQKQLFVEQHKHYLDEIIEQISEFSKRVILADANLDKVLSAYNKHRDKPIREQAENIIHLFTLTNLGAPAAFKYFDTTIDRKRYTSTKEVLDATLIHQSITGLYETRIDLSQLGGDGGGGGEAAAKPAPGGIPWLMKKPLQLTTLVPLQEYEERLLKQTMLTGSYKEKLQSLFLKYDALWQHWENQVGHRRIKPHHIATGTVNPRPQKQYPINPKAKASIQTVINDLLKQGVLIQQNSIMNTPVYPVPKPDGKWRMVLDYREVNKTIPLIAAQNQHSAGILSSIFRGKYKTTLDLSNGFWAHSITPESYWLTAFTWLGQQYCWTRLPQGFLNSPALFNADVVDLLKEVPNVQVYVDDIYISHDDPREHLEQLEKVFSLLLNAGYVVSLKKSEIAQHEVEFLGFNITKEGRGLTETFKQKLLNITPPRDLKQLQSILGLLNFARNFIPNFSELVKPLYNIIATAPGKYITWTTDNSQQLQNIISMLNSAENLEERNPEVRLIMKVNTSPSAGYIRFYNEFAKRPIMYLNYVYTKAEVKFTNTEKLLTTIHKGLIKALDLGMGQEILVYSPIVSMTKIQKTPLPERKALPIRWITWMSYLEDPRIQFHYDKTLPELQQVPTVTDDIIAKIKHPSEFSMVFYTDGSAIKHPNVNKSHNAGMGIAQVQFKPEFTVINTWSIPLGDHTAQLAEVAAVEFACKKALKIDGPVLIVTDSFYVAESVNKELPYWQSNGFFNNKKKPLKHVSKWKSIADCIQLKPDIIIIHEKGHQPTASTFHTEGNNLADKLATQGSYVVNAGKRTADGSEFEKRTADGSEFESPKKKAKVE

SEQ ID NO: 7458 - protein, 2176 aa, synthetic construct
MPAAKRVKLDGGDKKYSIGLDIGTNSVGWAVITDEYKVPSKKFKVLGNTDRHSIKKNLIGALLFDSGETAEATRLKRTARRRYTRRKNRICYLQEIFSNEMAKVDDSFFHRLEESFLVEEDKKHERHPIFGNIVDEVAYHEKYPTIYHLRKKLVDSTDKADLRLIYLALAHMIKFRGHFLIEGDLNPDNSDVDKLFIQLVQTYNQLFEENPINASGVDAKAILSARLSKSRRLENLIAQLPGEKKNGLFGNLIALSLGLTPNFKSNFDLAEDAKLQLSKDTYDDDLDNLLAQIGDQYADLFLAAKNLSDAILLSDILRVNTEITKAPLSASMIKRYDEHHQDLTLLKALVRQQLPEKYKEIFFDQSKNGYAGYIDGGASQEEFYKFIKPILEKMDGTEELLVKLNREDLLRKQRTFDNGSIPHQIHLGELHAILRRQEDFYPFLKDNREKIEKILTFRIPYYVGPLARGNSRFAWMTRKSEETITPWNFEEVVDKGASAQSFIERMTNFDKNLPNEKVLPKHSLLYEYFTVYNELTKVKYVTEGMRKPAFLSGEQKKAIVDLLFKTNRKVTVKQLKEDYFKKIECFDSVEISGVEDRFNASLGTYHDLLKIIKDKDFLDNEENEDILEDIVLTLTLFEDREMIEERLKTYAHLFDDKVMKQLKRRRYTGWGRLSRKLINGIRDKQSGKTILDFLKSDGFANRNFMQLIHDDSLTFKEDIQKAQVSGQGDSLHEHIANLAGSPAIKKGILQTVKVVDELVKVMGRHKPENIVIEMARENQTTQKGQKNSRERMKRIEEGIKELGSQILKEHPVENTQLQNEKLYLYYLQNGRDMYVDQELDINRLSDYDVDHIVPQSFLKDDSIDNKVLTRSDKARGKSDNVPSEEVVKKMKNYWRQLLNAKLITQRKFDNLTKAERGGLSELDKAGFIKRQLVETRQITKHVAQILDSRMNTKYDENDKLIREVKVITLKSKLVSDFRKDFQFYKVREINNYHHAHDAYLNAVVGTALIKKYPKLESEFVYGDYKVYDVRKMIAKSEQEIGKATAKYFFYSNIMNFFKTEITLANGEIRKRPLIETNGETGEIVWDKGRDFATVRKVLSMPQVNIVKKTEVQTGGFSKESILPKRNSDKLIARKKDWDPKKYGGFDSPTVAYSVLVVAKVEKGKSKKLKSVKELLGITIMERSSFEKNPIDFLEAKGYKEVKKDLIIKLPKYSLFELENGRKRMLASAGELQKGNELALPSKYVNFLYLASHYEKLKGSPEDNEQKQLFVEQHKHYLDEIIEQISEFSKRVILADANLDKVLSAYNKHRDKPIREQAENIIHLFTLTNLGAPAAFKYFDTTIDRKRYTSTKEVLDATLIHQSITGLYETRIDLSQLGGDGGGGGEAAAKPAPGGMDPLQLLQPLEAEIKGTKLKAHWNSGATITCVPQAFLEEEVPIKNIWIKTIHGEKEQPVYYLTFKIQGRKVEAEVISSPYDYILVSPSDIPWLMKKPLQLTTLVPLQEYEERLLKQTMLTGSYKEKLQSLFLKYDALWQHWENQVGHRRIKPHHIATGTVNPRPQKQYPINPKAKASIQTVINDLLKQGVLIQQNSIMNTPVYPVPKPDGKWRMVLDYREVNKTIPLIAAQNQHSAGILSSIFRGKYKTTLDLSNGFWAHSITPESYWLTAFTWLGQQYCWTRLPQGFLNSPALFNADVVDLLKEVPNVQVYVDDIYISHDDPREHLEQLEKVFSLLLNAGYVVSLKKSEIAQHEVEFLGFNITKEGRGLTETFKQKLLNITPPRDLKQLQSILGKLNFARNFIPNFSELVKPLYNIIATAPGKYITWTTDNSQQLQNIISMLNSAENLEERNPEVRLIMKVNTSPSAGYIRFYNEFAKRPIMYLNYVYTKAEVKFTNTEKLLTTIHKGLIKALDLGMGQEILVYSPIVSMTKIQKTPLPERKALPIRWITWMSYLEDPRIQFHYDKTLPELQQVPTVTDDIIAKIKHPSEFSMVFYTDGSAIKHPNVNKSHNAGMGIAQVQFKPEFTVINTWSIPLGDHTAQLAEVAAVEFACKKALKIDGPVLIVTDSFYVAESVNKELPYWQSNGFFNNKKKPLKHVSKWKSIADCIQLKPDIIIIHEKGHQPTASTFHTEGNNLADKLATQGSYVVNAGKRTADGSEFEKRTADGSEFESPKKKAKVE

SEQ ID NO: 7459 - protein, 2094 aa, synthetic construct
MPAAKRVKLDGGDKKYSIGLDIGTNSVGWAVITDEYKVPSKKFKVLGNTDRHSIKKNLIGALLFDSGETAEATRLKRTARRRYTRRKNRICYLQEIFSNEMAKVDDSFFHRLEESFLVEEDKKHERHPIFGNIVDEVAYHEKYPTIYHLRKKLVDSTDKADLRLIYLALAHMIKFRGHFLIEGDLNPDNSDVDKLFIQLVQTYNQLFEENPINASGVDAKAILSARLSKSRRLENLIAQLPGEKKNGLFGNLIALSLGLTPNFKSNFDLAEDAKLQLSKDTYDDDLDNLLAQIGDQYADLFLAAKNLSDAILLSDILRVNTEITKAPLSASMIKRYDEHHQDLTLLKALVRQQLPEKYKEIFFDQSKNGYAGYIDGGASQEEFYKFIKPILEKMDGTEELLVKLNREDLLRKQRTFDNGSIPHQIHLGELHAILRRQEDFYPFLKDNREKIEKILTFRIPYYVGPLARGNSRFAWMTRKSEETITPWNFEEVVDKGASAQSFIERMTNFDKNLPNEKVLPKHSLLYEYFTVYNELTKVKYVTEGMRKPAFLSGEQKKAIVDLLFKTNRKVTVKQLKEDYFKKIECFDSVEISGVEDRFNASLGTYHDLLKIIKDKDFLDNEENEDILEDIVLTLTLFEDREMIEERLKTYAHLFDDKVMKQLKRRRYTGWGRLSRKLINGIRDKQSGKTILDFLKSDGFANRNFMQLIHDDSLTFKEDIQKAQVSGQGDSLHEHIANLAGSPAIKKGILQTVKVVDELVKVMGRHKPENIVIEMARENQTTQKGQKNSRERMKRIEEGIKELGSQILKEHPVENTQLQNEKLYLYYLQNGRDMYVDQELDINRLSDYDVDHIVPQSFLKDDSIDNKVLTRSDKARGKSDNVPSEEVVKKMKNYWRQLLNAKLITQRKFDNLTKAERGGLSELDKAGFIKRQLVETRQITKHVAQILDSRMNTKYDENDKLIREVKVITLKSKLVSDFRKDFQFYKVREINNYHHAHDAYLNAVVGTALIKKYPKLESEFVYGDYKVYDVRKMIAKSEQEIGKATAKYFFYSNIMNFFKTEITLANGEIRKRPLIETNGETGEIVWDKGRDFATVRKVLSMPQVNIVKKTEVQTGGFSKESILPKRNSDKLIARKKDWDPKKYGGFDSPTVAYSVLVVAKVEKGKSKKLKSVKELLGITIMERSSFEKNPIDFLEAKGYKEVKKDLIIKLPKYSLFELENGRKRMLASAGELQKGNELALPSKYVNFLYLASHYEKLKGSPEDNEQKQLFVEQHKHYLDEIIEQISEFSKRVILADANLDKVLSAYNKHRDKPIREQAENIIHLFTLTNLGAPAAFKYFDTTIDRKRYTSTKEVLDATLIHQSITGLYETRIDLSQLGGDGGGGGEAAAKPAPGGVLNLEEEYRLHEKPVPSSIDPSWLQLFPTVWAERAGMGLANQVPPVVVELRSGASPVAVRQYPMSKEAREGIRPHIQRFLDLGVLVPCQSPWNTPLLPVKKPGTNDYRPVQDLREINKRVQDIHPTVPNPYNLLSSLPPSHTWYSVLDLKDAFFCLKLHPNSQPLFAFEWRDPEKGNTGQLTWTRLPQGFKNSPTLFNEALHRDLAPFRALNPQVVLLQYVDDLLVAAPTYRDCKEGTQKLLQELSKLGYRVSAKKAQLCQKEVTYLGYLLKEGKRWLTPARKATVMKIPPPTTPRQVREFLGTAGFCRLWIPGFASLAAPLYPLTKPSIPFIWTEEHQKAFDRIKEALLSAPALALPDLTKPFTLYVDERAGVARGVLTQTLGPWRRPVAYLSKKLDPVASGWPTCLKAVAAVALLLKDADKLTLGQNVTVIASHSLESIVRQPPDRWMTNARMTHYQSLLLNERVSFAPPAVLNPATLLPVESEATPVHRCSEILAEETGTRRDLKDQPLPGVPAWYTDGSSFIAEGKRRAGAAIVDGKRTVWASSLPEGTSAQKAELVALTQALRLAEGKDINIYTDSRYAFATAHIHGAIYKQRGWLTSAGKDIKNKEEILALLEAIHLPKRVAIIHCPGHQKGNDPVATGNRRADEAAKQAALSTRVLAETTKPAGKRTADGSEFEKRTADGSEFESPKKKAKVE

SEQ ID NO: 7460 - protein, 2096 aa, synthetic construct
MPAAKRVKLDGGDKKYSIGLDIGTNSVGWAVITDEYKVPSKKFKVLGNTDRHSIKKNLIGALLFDSGETAEATRLKRTARRRYTRRKNRICYLQEIFSNEMAKVDDSFFHRLEESFLVEEDKKHERHPIFGNIVDEVAYHEKYPTIYHLRKKLVDSTDKADLRLIYLALAHMIKFRGHFLIEGDLNPDNSDVDKLFIQLVQTYNQLFEENPINASGVDAKAILSARLSKSRRLENLIAQLPGEKKNGLFGNLIALSLGLTPNFKSNFDLAEDAKLQLSKDTYDDDLDNLLAQIGDQYADLFLAAKNLSDAILLSDILRVNTEITKAPLSASMIKRYDEHHQDLTLLKALVRQQLPEKYKEIFFDQSKNGYAGYIDGGASQEEFYKFIKPILEKMDGTEELLVKLNREDLLRKQRTFDNGSIPHQIHLGELHAILRRQEDFYPFLKDNREKIEKILTFRIPYYVGPLARGNSRFAWMTRKSEETITPWNFEEVVDKGASAQSFIERMTNFDKNLPNEKVLPKHSLLYEYFTVYNELTKVKYVTEGMRKPAFLSGEQKKAIVDLLFKTNRKVTVKQLKEDYFKKIECFDSVEISGVEDRFNASLGTYHDLLKIIKDKDFLDNEENEDILEDIVLTLTLFEDREMIEERLKTYAHLFDDKVMKQLKRRRYTGWGRLSRKLINGIRDKQSGKTILDFLKSDGFANRNFMQLIHDDSLTFKEDIQKAQVSGQGDSLHEHIANLAGSPAIKKGILQTVKVVDELVKVMGRHKPENIVIEMARENQTTQKGQKNSRERMKRIEEGIKELGSQILKEHPVENTQLQNEKLYLYYLQNGRDMYVDQELDINRLSDYDVDHIVPQSFLKDDSIDNKVLTRSDKARGKSDNVPSEEVVKKMKNYWRQLLNAKLITQRKFDNLTKAERGGLSELDKAGFIKRQLVETRQITKHVAQILDSRMNTKYDENDKLIREVKVITLKSKLVSDFRKDFQFYKVREINNYHHAHDAYLNAVVGTALIKKYPKLESEFVYGDYKVYDVRKMIAKSEQEIGKATAKYFFYSNIMNFFKTEITLANGEIRKRPLIETNGETGEIVWDKGRDFATVRKVLSMPQVNIVKKTEVQTGGFSKESILPKRNSDKLIARKKDWDPKKYGGFDSPTVAYSVLVVAKVEKGKSKKLKSVKELLGITIMERSSFEKNPIDFLEAKGYKEVKKDLIIKLPKYSLFELENGRKRMLASAGELQKGNELALPSKYVNFLYLASHYEKLKGSPEDNEQKQLFVEQHKHYLDEIIEQISEFSKRVILADANLDKVLSAYNKHRDKPIREQAENIIHLFTLTNLGAPAAFKYFDTTIDRKRYTSTKEVLDATLIHQSITGLYETRIDLSQLGGDGGGGGEAAAKPAPGGTLNIEDEYRLHETSKEPDVPLGSTWLSDFPQAWAETGGMGLAVRQAPLIIPLKATSTPVSIKQYPMSQEARLGIKPHIQRLLDQGILVPCQSPWNTPLLPVKKPGTNDYRPVQDLREVNKRVEDIHPTVPNPYNLLSGLPPSHQWYTVLDLKDAFFCLRLHPTSQPLFAFEWRDPEMGISGQLTWTRLPQGFKNSPTLFDEALHRDLADFRIQHPDLILLQYVDDLLLAATSEQDCQRGTRALLQTLGNLGYRASAKKAQICQKQVKYLGYLLKEGQRWLTEARKETVMGQPTPKTPRQLREFLGTAGFCRLWIPGFAEMAAPLYPLTKTGTLFNWGPDQQKAYQEIKQALLTAPALGLPDLTKPFELFVDEKQGYAKGVLTQKLGPWRRPVAYLSKKLDPVAAGWPPCLRMVAAIAVLTKDAGKLTMGQPLVILAPHAVEALVKQPPDRWLSNARMTHYQAMLLDTDRVQFGPVVALNPATLLPLPEKEAPHDCLEILAETHGTRPDLTDQPIPDADYTWYTDGSSFLQEGQRRAGAAVTTETEVIWARALPAGTSAQRAELIALTQALKMAEGKKLNVYTDSRYAFATAHVHGEIYRRRGLLTSEGREIKNKNEILALLKALFLPKRLSIIHCPGHQKGNSAEARGNRMADQAAREAAMKAVLETSTLLAGKRTADGSEFEKRTADGSEFESPKKKAKVE

SEQ ID NO: 7461 - protein, 2096 aa, synthetic construct
MPAAKRVKLDGGDKKYSIGLDIGTNSVGWAVITDEYKVPSKKFKVLGNTDRHSIKKNLIGALLFDSGETAEATRLKRTARRRYTRRKNRICYLQEIFSNEMAKVDDSFFHRLEESFLVEEDKKHERHPIFGNIVDEVAYHEKYPTIYHLRKKLVDSTDKADLRLIYLALAHMIKFRGHFLIEGDLNPDNSDVDKLFIQLVQTYNQLFEENPINASGVDAKAILSARLSKSRRLENLIAQLPGEKKNGLFGNLIALSLGLTPNFKSNFDLAEDAKLQLSKDTYDDDLDNLLAQIGDQYADLFLAAKNLSDAILLSDILRVNTEITKAPLSASMIKRYDEHHQDLTLLKALVRQQLPEKYKEIFFDQSKNGYAGYIDGGASQEEFYKFIKPILEKMDGTEELLVKLNREDLLRKQRTFDNGSIPHQIHLGELHAILRRQEDFYPFLKDNREKIEKILTFRIPYYVGPLARGNSRFAWMTRKSEETITPWNFEEVVDKGASAQSFIERMTNFDKNLPNEKVLPKHSLLYEYFTVYNELTKVKYVTEGMRKPAFLSGEQKKAIVDLLFKTNRKVTVKQLKEDYFKKIECFDSVEISGVEDRFNASLGTYHDLLKIIKDKDFLDNEENEDILEDIVLTLTLFEDREMIEERLKTYAHLFDDKVMKQLKRRRYTGWGRLSRKLINGIRDKQSGKTILDFLKSDGFANRNFMQLIHDDSLTFKEDIQKAQVSGQGDSLHEHIANLAGSPAIKKGILQTVKVVDELVKVMGRHKPENIVIEMARENQTTQKGQKNSRERMKRIEEGIKELGSQILKEHPVENTQLQNEKLYLYYLQNGRDMYVDQELDINRLSDYDVDHIVPQSFLKDDSIDNKVLTRSDKARGKSDNVPSEEVVKKMKNYWRQLLNAKLITQRKFDNLTKAERGGLSELDKAGFIKRQLVETRQITKHVAQILDSRMNTKYDENDKLIREVKVITLKSKLVSDFRKDFQFYKVREINNYHHAHDAYLNAVVGTALIKKYPKLESEFVYGDYKVYDVRKMIAKSEQEIGKATAKYFFYSNIMNFFKTEITLANGEIRKRPLIETNGETGEIVWDKGRDFATVRKVLSMPQVNIVKKTEVQTGGFSKESILPKRNSDKLIARKKDWDPKKYGGFDSPTVAYSVLVVAKVEKGKSKKLKSVKELLGITIMERSSFEKNPIDFLEAKGYKEVKKDLIIKLPKYSLFELENGRKRMLASAGELQKGNELALPSKYVNFLYLASHYEKLKGSPEDNEQKQLFVEQHKHYLDEIIEQISEFSKRVILADANLDKVLSAYNKHRDKPIREQAENIIHLFTLTNLGAPAAFKYFDTTIDRKRYTSTKEVLDATLIHQSITGLYETRIDLSQLGGDGGGGGEAAAKPAPGGTLNIEDEYRLHETSKEPDVPLGSTWLSDFPQAWAETGGMGLAVRQAPLIIPLKATSTPVSIKQYPMSQEARLGIKPHIQRLLDQGILVPCQSPWNTPLLPVKKPGTNDYRPVQDLREVNKRVEDIHPTVPNPYNLLSGLPPSHQWYTVLDLKDAFFCLRLHPTSQPLFAFEWRDPEMGISGQLTWTRLPQGFKNSPTLFNEALHRDLADFRIQHPDLILLQYVDDLLLAATSEQDCQRGTRALLQTLGNLGYRASAKKAQICQKQVKYLGYLLKEGQRWLTEARKETVMGQPTPKTPRQLREFLGKAGFCRLFIPGFAEMAAPLYPLTKPGTLFNWGPDQQKAYQEIKQALLTAPALGLPDLTKPFELFVDEKQGYAKGVLTQKLGPWRRPVAYLSKKLDPVAAGWPPCLRMVAAIAVLTKDAGKLTMGQPLVILAPHAVEALVKQPPDRWLSNARMTHYQAMLLDTDRVQFGPVVALNPATLLPLPEKEAPHDCLEILAETHGTRPDLTDQPIPDADYTWYTDGSSFLQEGQRRAGAAVTTETEVIWARALPAGTSAQRAELIALTQALKMAEGKKLNVYTDSRYAFATAHVHGEIYRRRGWLTSEGREIKNKNEILALLKALFLPKRLSIIHCPGHQKGNSAEARGNRMADQAAREAAMKAVLETSTLLAGKRTADGSEFEKRTADGSEFESPKKKAKVE

SEQ ID NO: 7462 - protein, 2098 aa, synthetic construct
MPAAKRVKLDGGDKKYSIGLDIGTNSVGWAVITDEYKVPSKKFKVLGNTDRHSIKKNLIGALLFDSGETAEATRLKRTARRRYTRRKNRICYLQEIFSNEMAKVDDSFFHRLEESFLVEEDKKHERHPIFGNIVDEVAYHEKYPTIYHLRKKLVDSTDKADLRLIYLALAHMIKFRGHFLIEGDLNPDNSDVDKLFIQLVQTYNQLFEENPINASGVDAKAILSARLSKSRRLENLIAQLPGEKKNGLFGNLIALSLGLTPNFKSNFDLAEDAKLQLSKDTYDDDLDNLLAQIGDQYADLFLAAKNLSDAILLSDILRVNTEITKAPLSASMIKRYDEHHQDLTLLKALVRQQLPEKYKEIFFDQSKNGYAGYIDGGASQEEFYKFIKPILEKMDGTEELLVKLNREDLLRKQRTFDNGSIPHQIHLGELHAILRRQEDFYPFLKDNREKIEKILTFRIPYYVGPLARGNSRFAWMTRKSEETITPWNFEEVVDKGASAQSFIERMTNFDKNLPNEKVLPKHSLLYEYFTVYNELTKVKYVTEGMRKPAFLSGEQKKAIVDLLFKTNRKVTVKQLKEDYFKKIECFDSVEISGVEDRFNASLGTYHDLLKIIKDKDFLDNEENEDILEDIVLTLTLFEDREMIEERLKTYAHLFDDKVMKQLKRRRYTGWGRLSRKLINGIRDKQSGKTILDFLKSDGFANRNFMQLIHDDSLTFKEDIQKAQVSGQGDSLHEHIANLAGSPAIKKGILQTVKVVDELVKVMGRHKPENIVIEMARENQTTQKGQKNSRERMKRIEEGIKELGSQILKEHPVENTQLQNEKLYLYYLQNGRDMYVDQELDINRLSDYDVDHIVPQSFLKDDSIDNKVLTRSDKARGKSDNVPSEEVVKKMKNYWRQLLNAKLITQRKFDNLTKAERGGLSELDKAGFIKRQLVETRQITKHVAQILDSRMNTKYDENDKLIREVKVITLKSKLVSDFRKDFQFYKVREINNYHHAHDAYLNAVVGTALIKKYPKLESEFVYGDYKVYDVRKMIAKSEQEIGKATAKYFFYSNIMNFFKTEITLANGEIRKRPLIETNGETGEIVWDKGRDFATVRKVLSMPQVNIVKKTEVQTGGFSKESILPKRNSDKLIARKKDWDPKKYGGFDSPTVAYSVLVVAKVEKGKSKKLKSVKELLGITIMERSSFEKNPIDFLEAKGYKEVKKDLIIKLPKYSLFELENGRKRMLASAGELQKGNELALPSKYVNFLYLASHYEKLKGSPEDNEQKQLFVEQHKHYLDEIIEQISEFSKRVILADANLDKVLSAYNKHRDKPIREQAENIIHLFTLTNLGAPAAFKYFDTTIDRKRYTSTKEVLDATLIHQSITGLYETRIDLSQLGGDGGGGGPAPEAAAKGGTAPLEEEYRLFLEAPIQNVTLLEQWKREIPKVWAEINPPGLASTQAPIHVQLLSTALPVRVRQYPITLEAKRSLRETIRKFRAAGILRPVHSPWNTPLLPVRKSGTSEYRMVQDLREVNKRVETIHPTVPNPYTLLSLLPPDRIWYSVLDLKDAFFCIPLAPESQLIFAFEWADAEEGESGQLTWTRLPQGFKNSPTLFNEALNRDLQGFRLDHPSVSLLQYVDDLLIAADTQAACLSATRDLLMTLAELGYRVSGKKAQLCQEEVTYLGFKIHKGSRSLSNSRTQAILQIPVPKTKRQVREFLGTIGYCRLWIPGFAELAQPLYAATRPGNDPLVWGEKEEEAFQSLKLALTQPPALALPSLDKPFQLFVEETSGAAKGVLTQALGPWKRPVAYLSKRLDPVAAGWPRCLRAIAAAALLTREASKLTFGQDIEITSSHNLESLLRSPPDKWLTNARITQYQVLLLDPPRVRFKQTAALNPATLLPETDDTLPIHHCLDTLDSLTSTRPDLTDQPLAQAEATLFTDGSSYIRDGKRYAGAAVVTLDSVIWAEPLPIGTSAQKAELIALTKALEWSKDKSVNIYTDSRYAFATLHVHGMIYRERGWLTAGGKAIKNAPEILALLTAVWLPKRVAVMHCKGHQKDDAPTSTGNRRADEVAREVAIRPLSTQATISAGKRTADGSEFEKRTADGSEFESPKKKAKVE

SEQ ID NO: 7463 - protein, 2102 aa, synthetic construct
MPAAKRVKLDGGDKKYSIGLDIGTNSVGWAVITDEYKVPSKKFKVLGNTDRHSIKKNLIGALLFDSGETAEATRLKRTARRRYTRRKNRICYLQEIFSNEMAKVDDSFFHRLEESFLVEEDKKHERHPIFGNIVDEVAYHEKYPTIYHLRKKLVDSTDKADLRLIYLALAHMIKFRGHFLIEGDLNPDNSDVDKLFIQLVQTYNQLFEENPINASGVDAKAILSARLSKSRRLENLIAQLPGEKKNGLFGNLIALSLGLTPNFKSNFDLAEDAKLQLSKDTYDDDLDNLLAQIGDQYADLFLAAKNLSDAILLSDILRVNTEITKAPLSASMIKRYDEHHQDLTLLKALVRQQLPEKYKEIFFDQSKNGYAGYIDGGASQEEFYKFIKPILEKMDGTEELLVKLNREDLLRKQRTFDNGSIPHQIHLGELHAILRRQEDFYPFLKDNREKIEKILTFRIPYYVGPLARGNSRFAWMTRKSEETITPWNFEEVVDKGASAQSFIERMTNFDKNLPNEKVLPKHSLLYEYFTVYNELTKVKYVTEGMRKPAFLSGEQKKAIVDLLFKTNRKVTVKQLKEDYFKKIECFDSVEISGVEDRFNASLGTYHDLLKIIKDKDFLDNEENEDILEDIVLTLTLFEDREMIEERLKTYAHLFDDKVMKQLKRRRYTGWGRLSRKLINGIRDKQSGKTILDFLKSDGFANRNFMQLIHDDSLTFKEDIQKAQVSGQGDSLHEHIANLAGSPAIKKGILQTVKVVDELVKVMGRHKPENIVIEMARENQTTQKGQKNSRERMKRIEEGIKELGSQILKEHPVENTQLQNEKLYLYYLQNGRDMYVDQELDINRLSDYDVDHIVPQSFLKDDSIDNKVLTRSDKARGKSDNVPSEEVVKKMKNYWRQLLNAKLITQRKFDNLTKAERGGLSELDKAGFIKRQLVETRQITKHVAQILDSRMNTKYDENDKLIREVKVITLKSKLVSDFRKDFQFYKVREINNYHHAHDAYLNAVVGTALIKKYPKLESEFVYGDYKVYDVRKMIAKSEQEIGKATAKYFFYSNIMNFFKTEITLANGEIRKRPLIETNGETGEIVWDKGRDFATVRKVLSMPQVNIVKKTEVQTGGFSKESILPKRNSDKLIARKKDWDPKKYGGFDSPTVAYSVLVVAKVEKGKSKKLKSVKELLGITIMERSSFEKNPIDFLEAKGYKEVKKDLIIKLPKYSLFELENGRKRMLASAGELQKGNELALPSKYVNFLYLASHYEKLKGSPEDNEQKQLFVEQHKHYLDEIIEQISEFSKRVILADANLDKVLSAYNKHRDKPIREQAENIIHLFTLTNLGAPAAFKYFDTTIDRKRYTSTKEVLDATLIHQSITGLYETRIDLSQLGGDGGGGGPAPEAAAKGGTVSLQDEHRLFDIPVTTSLPDVWLQDFPQAWAETGGLGRAKCQAPIIIDLKPTAVPVSIKQYPMSLEAHMGIRQHIIKFLELGVLRPCRSPWNTPLLPVKKPGTQDYRPVQDLREINKRTVDIHPTVPNPYNLLSTLKPDYSWYTVLDLKDAFFCLPLAPQSQELFAFEWKDPERGISGQLTWTRLPQGFKNSPTLFNEALHRDLTDFRTQHPEVTLLQYVDDLLLAAPTKKACTQGTRHLLQELGEKGYRASAKKAQICQTKVTYLGYILSEGKRWLTPGRIETVARIPPPRNPREVREFLGTAGFCRLWIPGFAELAAPLYALTKPSTPFTWQTEHQLAFEALKKALLSAPALGLPDTSKPFTLFLDERQGIAKGVLTQKLGPWKRPVAYLSKKLDPVAAGWPPCLRIMAATAMLVKDSAKLTLGQPLTVITPHTLEAIVRQPPDRWITNARLTHYQALLLDTDRVQFGPPVTLNPATLLPVPENQPSPHDCRQVLAETHGTREDLKDQELPDADHTWYTDGSSYLDSGTRRAGAAVVDGHNTIWAQSLPPGTSAQKAELIALTKALELSKGKKANIYTDSRYAFATAHTHGSIYERRGWLTSEGKEIKNKAEIIALLKALFLPQEVAIIHCPGHQKGQDPVAVGNRQADRVARQAAMAEVLTLATEPDNTSHITAGKRTADGSEFEKRTADGSEFESPKKKAKVE

SEQ ID NO: 7464 - protein, 2173 aa, synthetic construct
MPAAKRVKLDGGDKKYSIGLDIGTNSVGWAVITDEYKVPSKKFKVLGNTDRHSIKKNLIGALLFDSGETAEATRLKRTARRRYTRRKNRICYLQEIFSNEMAKVDDSFFHRLEESFLVEEDKKHERHPIFGNIVDEVAYHEKYPTIYHLRKKLVDSTDKADLRLIYLALAHMIKFRGHFLIEGDLNPDNSDVDKLFIQLVQTYNQLFEENPINASGVDAKAILSARLSKSRRLENLIAQLPGEKKNGLFGNLIALSLGLTPNFKSNFDLAEDAKLQLSKDTYDDDLDNLLAQIGDQYADLFLAAKNLSDAILLSDILRVNTEITKAPLSASMIKRYDEHHQDLTLLKALVRQQLPEKYKEIFFDQSKNGYAGYIDGGASQEEFYKFIKPILEKMDGTEELLVKLNREDLLRKQRTFDNGSIPHQIHLGELHAILRRQEDFYPFLKDNREKIEKILTFRIPYYVGPLARGNSRFAWMTRKSEETITPWNFEEVVDKGASAQSFIERMTNFDKNLPNEKVLPKHSLLYEYFTVYNELTKVKYVTEGMRKPAFLSGEQKKAIVDLLFKTNRKVTVKQLKEDYFKKIECFDSVEISGVEDRFNASLGTYHDLLKIIKDKDFLDNEENEDILEDIVLTLTLFEDREMIEERLKTYAHLFDDKVMKQLKRRRYTGWGRLSRKLINGIRDKQSGKTILDFLKSDGFANRNFMQLIHDDSLTFKEDIQKAQVSGQGDSLHEHIANLAGSPAIKKGILQTVKVVDELVKVMGRHKPENIVIEMARENQTTQKGQKNSRERMKRIEEGIKELGSQILKEHPVENTQLQNEKLYLYYLQNGRDMYVDQELDINRLSDYDVDHIVPQSFLKDDSIDNKVLTRSDKARGKSDNVPSEEVVKKMKNYWRQLLNAKLITQRKFDNLTKAERGGLSELDKAGFIKRQLVETRQITKHVAQILDSRMNTKYDENDKLIREVKVITLKSKLVSDFRKDFQFYKVREINNYHHAHDAYLNAVVGTALIKKYPKLESEFVYGDYKVYDVRKMIAKSEQEIGKATAKYFFYSNIMNFFKTEITLANGEIRKRPLIETNGETGEIVWDKGRDFATVRKVLSMPQVNIVKKTEVQTGGFSKESILPKRNSDKLIARKKDWDPKKYGGFDSPTVAYSVLVVAKVEKGKSKKLKSVKELLGITIMERSSFEKNPIDFLEAKGYKEVKKDLIIKLPKYSLFELENGRKRMLASAGELQKGNELALPSKYVNFLYLASHYEKLKGSPEDNEQKQLFVEQHKHYLDEIIEQISEFSKRVILADANLDKVLSAYNKHRDKPIREQAENIIHLFTLTNLGAPAAFKYFDTTIDRKRYTSTKEVLDATLIHQSITGLYETRIDLSQLGGDGGGGGPAPEAAAKGGMDLLKPLTVERKGVKIKGYWNSQADITCVPKDLLQGEEPVRQQNVTTIHGTQEGDVYYVNLKIDGRRINTEVIGTTLDYAIITPGDVPWILKKPLELTIKLDLEEQQGTLLNNSILSKKGKEELKQLFEKYSALWQSWENQVGHRRIRPHKIATGTVKPTPQKQYHINPKAKPDIQIVINDLLKQGVLIQKESTMNTPVYPVPKPNGRWRMVLDYRAVNKVTPLIAVQNQHSYGILGSLFKGRYKTTIDLSNGFWAHPIVPEDYWITAFTWQGKQYCWTVLPQGFLNSPGLFTGDVVDLLQGIPNVEVYVDDVYISHDSEKEHLEYLDILFNRLKEAGYIISLKKSNIANSIVDFLGFQITNEGRGLTDTFKEKLENITAPTTLKQLQSILGLLNFARNFIPDFTELIAPLYALIPKSTKNYVPWQIEHSTTLETLITKLNGAEYLQGRKGDKTLIMKVNASYTTGYIRYYNEGEKKPISYVSIVFSKTELKFTELEKLLTTVHKGLLKALDLSMGQNIHVYSPIVSMQNIQKTPQTAKKALASRWLSWLSYLEDPRIRFFYDPQMPALKDLPAVDTGKDNKKHPSNFQHIFYTDGSAITSPTKEGHLNAGMGIVYFINKDGNLQKQQEWSISLGNHTAQFAEIAAFEFALKKCLPLGGNILVVTDSNYVAKAYNEELDVWASNGFVNNRKKPLKHISKWKSVADLKRLRPDVVVTHEPGHQKLDSSPHAYGNNLADQLATQASFKVHAGKRTADGSEFEKRTADGSEFESPKKKAKVE

SEQ ID NO: 7465 - protein, 2087 aa, synthetic construct
MPAAKRVKLDGGDKKYSIGLDIGTNSVGWAVITDEYKVPSKKFKVLGNTDRHSIKKNLIGALLFDSGETAEATRLKRTARRRYTRRKNRICYLQEIFSNEMAKVDDSFFHRLEESFLVEEDKKHERHPIFGNIVDEVAYHEKYPTIYHLRKKLVDSTDKADLRLIYLALAHMIKFRGHFLIEGDLNPDNSDVDKLFIQLVQTYNQLFEENPINASGVDAKAILSARLSKSRRLENLIAQLPGEKKNGLFGNLIALSLGLTPNFKSNFDLAEDAKLQLSKDTYDDDLDNLLAQIGDQYADLFLAAKNLSDAILLSDILRVNTEITKAPLSASMIKRYDEHHQDLTLLKALVRQQLPEKYKEIFFDQSKNGYAGYIDGGASQEEFYKFIKPILEKMDGTEELLVKLNREDLLRKQRTFDNGSIPHQIHLGELHAILRRQEDFYPFLKDNREKIEKILTFRIPYYVGPLARGNSRFAWMTRKSEETITPWNFEEVVDKGASAQSFIERMTNFDKNLPNEKVLPKHSLLYEYFTVYNELTKVKYVTEGMRKPAFLSGEQKKAIVDLLFKTNRKVTVKQLKEDYFKKIECFDSVEISGVEDRFNASLGTYHDLLKIIKDKDFLDNEENEDILEDIVLTLTLFEDREMIEERLKTYAHLFDDKVMKQLKRRRYTGWGRLSRKLINGIRDKQSGKTILDFLKSDGFANRNFMQLIHDDSLTFKEDIQKAQVSGQGDSLHEHIANLAGSPAIKKGILQTVKVVDELVKVMGRHKPENIVIEMARENQTTQKGQKNSRERMKRIEEGIKELGSQILKEHPVENTQLQNEKLYLYYLQNGRDMYVDQELDINRLSDYDVDHIVPQSFLKDDSIDNKVLTRSDKARGKSDNVPSEEVVKKMKNYWRQLLNAKLITQRKFDNLTKAERGGLSELDKAGFIKRQLVETRQITKHVAQILDSRMNTKYDENDKLIREVKVITLKSKLVSDFRKDFQFYKVREINNYHHAHDAYLNAVVGTALIKKYPKLESEFVYGDYKVYDVRKMIAKSEQEIGKATAKYFFYSNIMNFFKTEITLANGEIRKRPLIETNGETGEIVWDKGRDFATVRKVLSMPQVNIVKKTEVQTGGFSKESILPKRNSDKLIARKKDWDPKKYGGFDSPTVAYSVLVVAKVEKGKSKKLKSVKELLGITIMERSSFEKNPIDFLEAKGYKEVKKDLIIKLPKYSLFELENGRKRMLASAGELQKGNELALPSKYVNFLYLASHYEKLKGSPEDNEQKQLFVEQHKHYLDEIIEQISEFSKRVILADANLDKVLSAYNKHRDKPIREQAENIIHLFTLTNLGAPAAFKYFDTTIDRKRYTSTKEVLDATLIHQSITGLYETRIDLSQLGGDGGGGGPAPEAAAKGGVPWILKKPLELTIKLDLEEQQGTLLNNSILSKKGKEELKQLFEKYSALWQSWENQVGHRRIRPHKIATGTVKPTPQKQYHINPKAKPDIQIVINDLLKQGVLIQKESTMNTPVYPVPKPNGRWRMVLDYRAVNKVTPLIAVQNQHSYGILGSLFKGRYKTTIDLSNGFWAHPIVPEDYWITAFTWQGKQYCWTVLPQGFLNSPGLFNGDVVDLLQGIPNVEVYVDDVYISHDSEKEHLEYLDILFNRLKEAGYIISLKKSNIANSIVDFLGFQITNEGRGLTDTFKEKLENITAPTTLKQLQSILGLLNFARNFIPDFTELIAPLYALIPKSPKNYVPWQIEHSTTLETLITKLNGAEYLQGRKGDKTLIMKVNASYTTGYIRYYNEGEKKPISYVSIVFSKTELKFTELEKLLTTVHKGLLKALDLSMGQNIHVYSPIVSMQNIQKTPQTAKKALASRWLSWLSYLEDPRIRFFYDPQMPALKDLPAVDTGKDNKKHPSNFQHIFYTDGSAITSPTKEGHLNAGMGIVYFINKDGNLQKQQEWSISLGNHTAQFAEIAAFEFALKKCLPLGGNILVVTDSNYVAKAYNEELDVWASNGFVNNRKKPLKHISKWKSVADLKRLRPDVVVTHEPGHQKLDSSPHAYGNNLADQLATQASFKVHAGKRTADGSEFEKRTADGSEFESPKKKAKVE

SEQ ID NO: 7466 - protein, 2173 aa, synthetic construct
MPAAKRVKLDGGDKKYSIGLDIGTNSVGWAVITDEYKVPSKKFKVLGNTDRHSIKKNLIGALLFDSGETAEATRLKRTARRRYTRRKNRICYLQEIFSNEMAKVDDSFFHRLEESFLVEEDKKHERHPIFGNIVDEVAYHEKYPTIYHLRKKLVDSTDKADLRLIYLALAHMIKFRGHFLIEGDLNPDNSDVDKLFIQLVQTYNQLFEENPINASGVDAKAILSARLSKSRRLENLIAQLPGEKKNGLFGNLIALSLGLTPNFKSNFDLAEDAKLQLSKDTYDDDLDNLLAQIGDQYADLFLAAKNLSDAILLSDILRVNTEITKAPLSASMIKRYDEHHQDLTLLKALVRQQLPEKYKEIFFDQSKNGYAGYIDGGASQEEFYKFIKPILEKMDGTEELLVKLNREDLLRKQRTFDNGSIPHQIHLGELHAILRRQEDFYPFLKDNREKIEKILTFRIPYYVGPLARGNSRFAWMTRKSEETITPWNFEEVVDKGASAQSFIERMTNFDKNLPNEKVLPKHSLLYEYFTVYNELTKVKYVTEGMRKPAFLSGEQKKAIVDLLFKTNRKVTVKQLKEDYFKKIECFDSVEISGVEDRFNASLGTYHDLLKIIKDKDFLDNEENEDILEDIVLTLTLFEDREMIEERLKTYAHLFDDKVMKQLKRRRYTGWGRLSRKLINGIRDKQSGKTILDFLKSDGFANRNFMQLIHDDSLTFKEDIQKAQVSGQGDSLHEHIANLAGSPAIKKGILQTVKVVDELVKVMGRHKPENIVIEMARENQTTQKGQKNSRERMKRIEEGIKELGSQILKEHPVENTQLQNEKLYLYYLQNGRDMYVDQELDINRLSDYDVDHIVPQSFLKDDSIDNKVLTRSDKARGKSDNVPSEEVVKKMKNYWRQLLNAKLITQRKFDNLTKAERGGLSELDKAGFIKRQLVETRQITKHVAQILDSRMNTKYDENDKLIREVKVITLKSKLVSDFRKDFQFYKVREINNYHHAHDAYLNAVVGTALIKKYPKLESEFVYGDYKVYDVRKMIAKSEQEIGKATAKYFFYSNIMNFFKTEITLANGEIRKRPLIETNGETGEIVWDKGRDFATVRKVLSMPQVNIVKKTEVQTGGFSKESILPKRNSDKLIARKKDWDPKKYGGFDSPTVAYSVLVVAKVEKGKSKKLKSVKELLGITIMERSSFEKNPIDFLEAKGYKEVKKDLIIKLPKYSLFELENGRKRMLASAGELQKGNELALPSKYVNFLYLASHYEKLKGSPEDNEQKQLFVEQHKHYLDEIIEQISEFSKRVILADANLDKVLSAYNKHRDKPIREQAENIIHLFTLTNLGAPAAFKYFDTTIDRKRYTSTKEVLDATLIHQSITGLYETRIDLSQLGGDGGGGGPAPEAAAKGGMDLLKPLTVERKGVKIKGYWNSQADITCVPKDLLQGEEPVRQQNVTTIHGTQEGDVYYVNLKIDGRRINTEVIGTTLDYAIITPGDVPWILKKPLELTIKLDLEEQQGTLLNNSILSKKGKEELKQLFEKYSALWQSWENQVGHRRIRPHKIATGTVKPTPQKQYHINPKAKPDIQIVINDLLKQGVLIQKESTMNTPVYPVPKPNGRWRMVLDYRAVNKVTPLIAVQNQHSYGILGSLFKGRYKTTIDLSNGFWAHPIVPEDYWITAFTWQGKQYCWTVLPQGFLNSPGLFNGDVVDLLQGIPNVEVYVDDVYISHDSEKEHLEYLDILFNRLKEAGYIISLKKSNIANSIVDFLGFQITNEGRGLTDTFKEKLENITAPTTLKQLQSILGLLNFARNFIPDFTELIAPLYALIPKSPKNYVPWQIEHSTTLETLITKLNGAEYLQGRKGDKTLIMKVNASYTTGYIRYYNEGEKKPISYVSIVFSKTELKFTELEKLLTTVHKGLLKALDLSMGQNIHVYSPIVSMQNIQKTPQTAKKALASRWLSWLSYLEDPRIRFFYDPQMPALKDLPAVDTGKDNKKHPSNFQHIFYTDGSAITSPTKEGHLNAGMGIVYFINKDGNLQKQQEWSISLGNHTAQFAEIAAFEFALKKCLPLGGNILVVTDSNYVAKAYNEELDVWASNGFVNNRKKPLKHISKWKSVADLKRLRPDVVVTHEPGHQKLDSSPHAYGNNLADQLATQASFKVHAGKRTADGSEFEKRTADGSEFESPKKKAKVE

SEQ ID NO: 7467 - protein, 2094 aa, synthetic construct
MPAAKRVKLDGGDKKYSIGLDIGTNSVGWAVITDEYKVPSKKFKVLGNTDRHSIKKNLIGALLFDSGETAEATRLKRTARRRYTRRKNRICYLQEIFSNEMAKVDDSFFHRLEESFLVEEDKKHERHPIFGNIVDEVAYHEKYPTIYHLRKKLVDSTDKADLRLIYLALAHMIKFRGHFLIEGDLNPDNSDVDKLFIQLVQTYNQLFEENPINASGVDAKAILSARLSKSRRLENLIAQLPGEKKNGLFGNLIALSLGLTPNFKSNFDLAEDAKLQLSKDTYDDDLDNLLAQIGDQYADLFLAAKNLSDAILLSDILRVNTEITKAPLSASMIKRYDEHHQDLTLLKALVRQQLPEKYKEIFFDQSKNGYAGYIDGGASQEEFYKFIKPILEKMDGTEELLVKLNREDLLRKQRTFDNGSIPHQIHLGELHAILRRQEDFYPFLKDNREKIEKILTFRIPYYVGPLARGNSRFAWMTRKSEETITPWNFEEVVDKGASAQSFIERMTNFDKNLPNEKVLPKHSLLYEYFTVYNELTKVKYVTEGMRKPAFLSGEQKKAIVDLLFKTNRKVTVKQLKEDYFKKIECFDSVEISGVEDRFNASLGTYHDLLKIIKDKDFLDNEENEDILEDIVLTLTLFEDREMIEERLKTYAHLFDDKVMKQLKRRRYTGWGRLSRKLINGIRDKQSGKTILDFLKSDGFANRNFMQLIHDDSLTFKEDIQKAQVSGQGDSLHEHIANLAGSPAIKKGILQTVKVVDELVKVMGRHKPENIVIEMARENQTTQKGQKNSRERMKRIEEGIKELGSQILKEHPVENTQLQNEKLYLYYLQNGRDMYVDQELDINRLSDYDVDHIVPQSFLKDDSIDNKVLTRSDKARGKSDNVPSEEVVKKMKNYWRQLLNAKLITQRKFDNLTKAERGGLSELDKAGFIKRQLVETRQITKHVAQILDSRMNTKYDENDKLIREVKVITLKSKLVSDFRKDFQFYKVREINNYHHAHDAYLNAVVGTALIKKYPKLESEFVYGDYKVYDVRKMIAKSEQEIGKATAKYFFYSNIMNFFKTEITLANGEIRKRPLIETNGETGEIVWDKGRDFATVRKVLSMPQVNIVKKTEVQTGGFSKESILPKRNSDKLIARKKDWDPKKYGGFDSPTVAYSVLVVAKVEKGKSKKLKSVKELLGITIMERSSFEKNPIDFLEAKGYKEVKKDLIIKLPKYSLFELENGRKRMLASAGELQKGNELALPSKYVNFLYLASHYEKLKGSPEDNEQKQLFVEQHKHYLDEIIEQISEFSKRVILADANLDKVLSAYNKHRDKPIREQAENIIHLFTLTNLGAPAAFKYFDTTIDRKRYTSTKEVLDATLIHQSITGLYETRIDLSQLGGDGGGGGPAPEAAAKGGVLNLEEEYRLHEKPVPSSIDPSWLQLFPTVWAERAGMGLANQVPPVVVELRSGASPVAVRQYPMSKEAREGIRPHIQKFLDLGVLVPCRSPWNTPLLPVKKPGTNDYRPVQDLREINKRVQDIHPTVPNPYNLLSSLPPSYTWYSVLDLKDAFFCLRLHPNSQPLFAFEWKDPEKGNTGQLTWTRLPQGFKNSPTLFNEALHRDLAPFRALNPQVVLLQYVDDLLVAAPTYEDCKKGTQKLLQELSKLGYRVSAKKAQLCQREVTYLGYLLKEGKRWLTPARKATVMKIPVPTTPRQVREFLGKAGFCRLFIPGFASLAAPLYPLTKPSIPFIWTEEHQQAFDHIKKALLSAPALALPDLTKPFTLYIDERAGVARGVLTQTLGPWRRPVAYLSKKLDPVASGWPTCLKAVAAVALLLKDADKLTLGQNVTVIASHSLESIVRQPPDRWMTNARMTHYQSLLLNERVSFAPPAVLNPATLLPVESEATPVHRCSEILAEETGTRRDLEDQPLPGVPTWYTDGSSFITEGKRRAGAPIVDGKRTVWASSLPEGTSAQKAELVALTQALRLAEGKNINIYTDSRYAFATAHIHGAIYKQRGWLTSAGKDIKNKEEILALLEAIHLPRRVAIIHCPGHQRGSNPVATGNRRADEAAKQAALSTRVLAGTTKPAGKRTADGSEFEKRTADGSEFESPKKKAKVE

SEQ ID NO: 7468 - protein, 2009 aa, synthetic construct
MPAAKRVKLDGGDKKYSIGLDIGTNSVGWAVITDEYKVPSKKFKVLGNTDRHSIKKNLIGALLFDSGETAEATRLKRTARRRYTRRKNRICYLQEIFSNEMAKVDDSFFHRLEESFLVEEDKKHERHPIFGNIVDEVAYHEKYPTIYHLRKKLVDSTDKADLRLIYLALAHMIKFRGHFLIEGDLNPDNSDVDKLFIQLVQTYNQLFEENPINASGVDAKAILSARLSKSRRLENLIAQLPGEKKNGLFGNLIALSLGLTPNFKSNFDLAEDAKLQLSKDTYDDDLDNLLAQIGDQYADLFLAAKNLSDAILLSDILRVNTEITKAPLSASMIKRYDEHHQDLTLLKALVRQQLPEKYKEIFFDQSKNGYAGYIDGGASQEEFYKFIKPILEKMDGTEELLVKLNREDLLRKQRTFDNGSIPHQIHLGELHAILRRQEDFYPFLKDNREKIEKILTFRIPYYVGPLARGNSRFAWMTRKSEETITPWNFEEVVDKGASAQSFIERMTNFDKNLPNEKVLPKHSLLYEYFTVYNELTKVKYVTEGMRKPAFLSGEQKKAIVDLLFKTNRKVTVKQLKEDYFKKIECFDSVEISGVEDRFNASLGTYHDLLKIIKDKDFLDNEENEDILEDIVLTLTLFEDREMIEERLKTYAHLFDDKVMKQLKRRRYTGWGRLSRKLINGIRDKQSGKTILDFLKSDGFANRNFMQLIHDDSLTFKEDIQKAQVSGQGDSLHEHIANLAGSPAIKKGILQTVKVVDELVKVMGRHKPENIVIEMARENQTTQKGQKNSRERMKRIEEGIKELGSQILKEHPVENTQLQNEKLYLYYLQNGRDMYVDQELDINRLSDYDVDHIVPQSFLKDDSIDNKVLTRSDKARGKSDNVPSEEVVKKMKNYWRQLLNAKLITQRKFDNLTKAERGGLSELDKAGFIKRQLVETRQITKHVAQILDSRMNTKYDENDKLIREVKVITLKSKLVSDFRKDFQFYKVREINNYHHAHDAYLNAVVGTALIKKYPKLESEFVYGDYKVYDVRKMIAKSEQEIGKATAKYFFYSNIMNFFKTEITLANGEIRKRPLIETNGETGEIVWDKGRDFATVRKVLSMPQVNIVKKTEVQTGGFSKESILPKRNSDKLIARKKDWDPKKYGGFDSPTVAYSVLVVAKVEKGKSKKLKSVKELLGITIMERSSFEKNPIDFLEAKGYKEVKKDLIIKLPKYSLFELENGRKRMLASAGELQKGNELALPSKYVNFLYLASHYEKLKGSPEDNEQKQLFVEQHKHYLDEIIEQISEFSKRVILADANLDKVLSAYNKHRDKPIREQAENIIHLFTLTNLGAPAAFKYFDTTIDRKRYTSTKEVLDATLIHQSITGLYETRIDLSQLGGDGGGGGPAPEAAAKGGHLPPPPQVDQFPLNLPERLQALNDLVSKALEAGHIEPYSGPGNNPVFPVKKPNGKWRFIHDLRATNAITTTLTSPSPGPPDLTSLPTALPHLQTIDLTDAFFQIPLPKQYQPYFAFTIPQPCNYGPGTRYAWTVLPQGFKNSPTLFQQQLAAVLNPMRKMFPTSTIVQYMDDILLASPTNEELQQLSQLTLQALTTHGLPISQEKTQQTPGQIRFLGQVISPNHITYESTPTIPIKSQWTLTELQVILGEIQWVSKGTPILRKHLQSLYSALHPYRDPRACITLTPQQLHALHAIQQALQHNCRGRLNPALPLLGLISLSTSGTTSVIFQPKQNWPLAWLHTPHPPTSLCPWGHLLACTILTLDKYTLQHYGQLCQSFHHNMSKQALCDFLRNSPHPSVGILIHHMGRFHNLGSQPSGPWKTLLHLPTLLQEPRLLRPIFTLSPVVLDTAPCLFSDGSPQKAAYVLWDQTILQQDITPLPSHETHSAQKGELLALICGLRAAKPWPSLNIFLDSKYLIKYLHSLAIGAFLGTSAHQTLQAALPPLLQGKTIYLHHVRSHTNLPDPISTFNEYTDSLILAPLVPLAGKRTADGSEFEKRTADGSEFESPKKKAKVE

SEQ ID NO: 7469 - protein, 2127 aa, synthetic construct
MPAAKRVKLDGGDKKYSIGLDIGTNSVGWAVITDEYKVPSKKFKVLGNTDRHSIKKNLIGALLFDSGETAEATRLKRTARRRYTRRKNRICYLQEIFSNEMAKVDDSFFHRLEESFLVEEDKKHERHPIFGNIVDEVAYHEKYPTIYHLRKKLVDSTDKADLRLIYLALAHMIKFRGHFLIEGDLNPDNSDVDKLFIQLVQTYNQLFEENPINASGVDAKAILSARLSKSRRLENLIAQLPGEKKNGLFGNLIALSLGLTPNFKSNFDLAEDAKLQLSKDTYDDDLDNLLAQIGDQYADLFLAAKNLSDAILLSDILRVNTEITKAPLSASMIKRYDEHHQDLTLLKALVRQQLPEKYKEIFFDQSKNGYAGYIDGGASQEEFYKFIKPILEKMDGTEELLVKLNREDLLRKQRTFDNGSIPHQIHLGELHAILRRQEDFYPFLKDNREKIEKILTFRIPYYVGPLARGNSRFAWMTRKSEETITPWNFEEVVDKGASAQSFIERMTNFDKNLPNEKVLPKHSLLYEYFTVYNELTKVKYVTEGMRKPAFLSGEQKKAIVDLLFKTNRKVTVKQLKEDYFKKIECFDSVEISGVEDRFNASLGTYHDLLKIIKDKDFLDNEENEDILEDIVLTLTLFEDREMIEERLKTYAHLFDDKVMKQLKRRRYTGWGRLSRKLINGIRDKQSGKTILDFLKSDGFANRNFMQLIHDDSLTFKEDIQKAQVSGQGDSLHEHIANLAGSPAIKKGILQTVKVVDELVKVMGRHKPENIVIEMARENQTTQKGQKNSRERMKRIEEGIKELGSQILKEHPVENTQLQNEKLYLYYLQNGRDMYVDQELDINRLSDYDVDHIVPQSFLKDDSIDNKVLTRSDKARGKSDNVPSEEVVKKMKNYWRQLLNAKLITQRKFDNLTKAERGGLSELDKAGFIKRQLVETRQITKHVAQILDSRMNTKYDENDKLIREVKVITLKSKLVSDFRKDFQFYKVREINNYHHAHDAYLNAVVGTALIKKYPKLESEFVYGDYKVYDVRKMIAKSEQEIGKATAKYFFYSNIMNFFKTEITLANGEIRKRPLIETNGETGEIVWDKGRDFATVRKVLSMPQVNIVKKTEVQTGGFSKESILPKRNSDKLIARKKDWDPKKYGGFDSPTVAYSVLVVAKVEKGKSKKLKSVKELLGITIMERSSFEKNPIDFLEAKGYKEVKKDLIIKLPKYSLFELENGRKRMLASAGELQKGNELALPSKYVNFLYLASHYEKLKGSPEDNEQKQLFVEQHKHYLDEIIEQISEFSKRVILADANLDKVLSAYNKHRDKPIREQAENIIHLFTLTNLGAPAAFKYFDTTIDRKRYTSTKEVLDATLIHQSITGLYETRIDLSQLGGDGGGGGPAPEAAAKGGLLGRDLLTKLKAQIQFSTEGPQVTWEDRPAMCLVLNLEEEYRLHEKPVPPSIDPSWLQLFPMVWAEKAGMGLANQVPPVVVELKSDASPVAVRQYPMSKEAREGIRPHIQRFLDLGILVPCQSPWNTPLLPVKKPGTNDYRPVQDLREVNKRVQDIHPTVPNPYNLLSSLPPSHTWYSVLDLKDAFFCLKLHPNSQPLFAFEWRDPEKGNTGQLTWTRLPQGFKNSPTLFNEALHRDLASFRALNPQVVMLQYVDDLLVAAPTYRDCKEGTRRLLQELSKLGYRVSAKKAQLCREEVTYLGYLLKGGKRWLTPARKATVMKIPTPTTPRQVREFLGTAGFCRLWIPGFASLAAPLYPLTRPKVPFTWTEAHQEAFGRIKEALLSAPALALPDLTKPFALYVDEKEGVARGVLTQTLGPWRRPVAYLSKKLDPVASGWPTCLKAIAAVALLLKDADKLTLGQNVLVIAPHNLESIVRQPPDRWMTNARMTHYQSLLLNERVSFAPPAILNPATLLPVESDDTPIHICSEILAEETGTRPDLRDQPLPGVPAWYTDGSSFIMDGRRQAGAAIVDNKRTVWASNLPEGTSAQKAELIALTQALRLAEGKSINIYTDSRYAFATAHVHGAIYKQRGWLTSAGKDIKNKEEILALLEAIHLPKRVAIIHCPGHQRGTDPVATGNRKADEAAKQAAQSTRILTETTKNAGKRTADGSEFEKRTADGSEFESPKKKAKVE

SEQ ID NO: 7470 - protein, 2127 aa, synthetic construct
MPAAKRVKLDGGDKKYSIGLDIGTNSVGWAVITDEYKVPSKKFKVLGNTDRHSIKKNLIGALLFDSGETAEATRLKRTARRRYTRRKNRICYLQEIFSNEMAKVDDSFFHRLEESFLVEEDKKHERHPIFGNIVDEVAYHEKYPTIYHLRKKLVDSTDKADLRLIYLALAHMIKFRGHFLIEGDLNPDNSDVDKLFIQLVQTYNQLFEENPINASGVDAKAILSARLSKSRRLENLIAQLPGEKKNGLFGNLIALSLGLTPNFKSNFDLAEDAKLQLSKDTYDDDLDNLLAQIGDQYADLFLAAKNLSDAILLSDILRVNTEITKAPLSASMIKRYDEHHQDLTLLKALVRQQLPEKYKEIFFDQSKNGYAGYIDGGASQEEFYKFIKPILEKMDGTEELLVKLNREDLLRKQRTFDNGSIPHQIHLGELHAILRRQEDFYPFLKDNREKIEKILTFRIPYYVGPLARGNSRFAWMTRKSEETITPWNFEEVVDKGASAQSFIERMTNFDKNLPNEKVLPKHSLLYEYFTVYNELTKVKYVTEGMRKPAFLSGEQKKAIVDLLFKTNRKVTVKQLKEDYFKKIECFDSVEISGVEDRFNASLGTYHDLLKIIKDKDFLDNEENEDILEDIVLTLTLFEDREMIEERLKTYAHLFDDKVMKQLKRRRYTGWGRLSRKLINGIRDKQSGKTILDFLKSDGFANRNFMQLIHDDSLTFKEDIQKAQVSGQGDSLHEHIANLAGSPAIKKGILQTVKVVDELVKVMGRHKPENIVIEMARENQTTQKGQKNSRERMKRIEEGIKELGSQILKEHPVENTQLQNEKLYLYYLQNGRDMYVDQELDINRLSDYDVDHIVPQSFLKDDSIDNKVLTRSDKARGKSDNVPSEEVVKKMKNYWRQLLNAKLITQRKFDNLTKAERGGLSELDKAGFIKRQLVETRQITKHVAQILDSRMNTKYDENDKLIREVKVITLKSKLVSDFRKDFQFYKVREINNYHHAHDAYLNAVVGTALIKKYPKLESEFVYGDYKVYDVRKMIAKSEQEIGKATAKYFFYSNIMNFFKTEITLANGEIRKRPLIETNGETGEIVWDKGRDFATVRKVLSMPQVNIVKKTEVQTGGFSKESILPKRNSDKLIARKKDWDPKKYGGFDSPTVAYSVLVVAKVEKGKSKKLKSVKELLGITIMERSSFEKNPIDFLEAKGYKEVKKDLIIKLPKYSLFELENGRKRMLASAGELQKGNELALPSKYVNFLYLASHYEKLKGSPEDNEQKQLFVEQHKHYLDEIIEQISEFSKRVILADANLDKVLSAYNKHRDKPIREQAENIIHLFTLTNLGAPAAFKYFDTTIDRKRYTSTKEVLDATLIHQSITGLYETRIDLSQLGGDGGGGGPAPEAAAKGGLLGRDLLTKLKAQIQFSTEGPQVTWEDRPAMCLVLNLEEEYRLHEKPVPPSIDPSWLQLFPMVWAEKAGMGLANQVPPVVVELKSDASPVAVRQYPMSKEAREGIRPHIQRFLDLGILVPCQSPWNTPLLPVKKPGTNDYRPVQDLREVNKRVQDIHPTVPNPYNLLSSLPPSHTWYSVLDLKDAFFCLKLHPNSQPLFAFEWRDPEKGNTGQLTWTRLPQGFKNSPTLFNEALHRDLASFRALNPQVVMLQYVDDLLVAAPTYRDCKEGTRRLLQELSKLGYRVSAKKAQLCREEVTYLGYLLKGGKRWLTPARKATVMKIPTPTTPRQVREFLGKAGFCRLFIPGFASLAAPLYPLTRPKVPFTWTEAHQEAFGRIKEALLSAPALALPDLTKPFALYVDEKEGVARGVLTQTLGPWRRPVAYLSKKLDPVASGWPTCLKAIAAVALLLKDADKLTLGQNVLVIAPHNLESIVRQPPDRWMTNARMTHYQSLLLNERVSFAPPAILNPATLLPVESDDTPIHICSEILAEETGTRPDLRDQPLPGVPAWYTDGSSFIMDGRRQAGAAIVDNKRTVWASNLPEGTSAQKAELIALTQALRLAEGKSINIYTDSRYAFATAHVHGAIYKQRGWLTSAGKDIKNKEEILALLEAIHLPKRVAIIHCPGHQRGTDPVATGNRKADEAAKQAAQSTRILTETTKNAGKRTADGSEFEKRTADGSEFESPKKKAKVE

SEQ ID NO: 7471 - protein, 2096 aa, synthetic construct
MPAAKRVKLDGGDKKYSIGLDIGTNSVGWAVITDEYKVPSKKFKVLGNTDRHSIKKNLIGALLFDSGETAEATRLKRTARRRYTRRKNRICYLQEIFSNEMAKVDDSFFHRLEESFLVEEDKKHERHPIFGNIVDEVAYHEKYPTIYHLRKKLVDSTDKADLRLIYLALAHMIKFRGHFLIEGDLNPDNSDVDKLFIQLVQTYNQLFEENPINASGVDAKAILSARLSKSRRLENLIAQLPGEKKNGLFGNLIALSLGLTPNFKSNFDLAEDAKLQLSKDTYDDDLDNLLAQIGDQYADLFLAAKNLSDAILLSDILRVNTEITKAPLSASMIKRYDEHHQDLTLLKALVRQQLPEKYKEIFFDQSKNGYAGYIDGGASQEEFYKFIKPILEKMDGTEELLVKLNREDLLRKQRTFDNGSIPHQIHLGELHAILRRQEDFYPFLKDNREKIEKILTFRIPYYVGPLARGNSRFAWMTRKSEETITPWNFEEVVDKGASAQSFIERMTNFDKNLPNEKVLPKHSLLYEYFTVYNELTKVKYVTEGMRKPAFLSGEQKKAIVDLLFKTNRKVTVKQLKEDYFKKIECFDSVEISGVEDRFNASLGTYHDLLKIIKDKDFLDNEENEDILEDIVLTLTLFEDREMIEERLKTYAHLFDDKVMKQLKRRRYTGWGRLSRKLINGIRDKQSGKTILDFLKSDGFANRNFMQLIHDDSLTFKEDIQKAQVSGQGDSLHEHIANLAGSPAIKKGILQTVKVVDELVKVMGRHKPENIVIEMARENQTTQKGQKNSRERMKRIEEGIKELGSQILKEHPVENTQLQNEKLYLYYLQNGRDMYVDQELDINRLSDYDVDHIVPQSFLKDDSIDNKVLTRSDKARGKSDNVPSEEVVKKMKNYWRQLLNAKLITQRKFDNLTKAERGGLSELDKAGFIKRQLVETRQITKHVAQILDSRMNTKYDENDKLIREVKVITLKSKLVSDFRKDFQFYKVREINNYHHAHDAYLNAVVGTALIKKYPKLESEFVYGDYKVYDVRKMIAKSEQEIGKATAKYFFYSNIMNFFKTEITLANGEIRKRPLIETNGETGEIVWDKGRDFATVRKVLSMPQVNIVKKTEVQTGGFSKESILPKRNSDKLIARKKDWDPKKYGGFDSPTVAYSVLVVAKVEKGKSKKLKSVKELLGITIMERSSFEKNPIDFLEAKGYKEVKKDLIIKLPKYSLFELENGRKRMLASAGELQKGNELALPSKYVNFLYLASHYEKLKGSPEDNEQKQLFVEQHKHYLDEIIEQISEFSKRVILADANLDKVLSAYNKHRDKPIREQAENIIHLFTLTNLGAPAAFKYFDTTIDRKRYTSTKEVLDATLIHQSITGLYETRIDLSQLGGDGGGGGPAPEAAAKGGLGIEDEYRLHETSTEPDVSLGSTWLSDFPQAWAETGGMGLAVRQAPLIIPLKATSTPVSIQQYPMSHEARLGIKPHIQRLLDQGILVPCQSPWNTPLLPVKKPGTNDYRPVQDLREVNKRVEDIHPTVPNPYNLLSGLPPSHQWYTVLDLKDAFFCLRLHPTSQPLFAFEWRDPGMGISGQLTWTRLPQGFKNSPTLFNEALHRDLADFRIQHPDLILLQYVDDILLAATSELDCQQGTRALLQTLGDLGYRASAKKAQICQKQVKYLGYLLREGQRWLTEARKETVMGQPVPKTPRQLREFLGKAGFCRLFIPGFAEMAAPLYPLTKPGTLFSWGPDQQKAYQEIKQALLTAPALGLPDLTKPFELFVDEKQGYAKGVLTQKLGPWRRPVAYLSKKLDPVAAGWPPCLRMVAAIAVLTKDAGKLTMGQPLVILAPHAVEALVKQPPDRWLSNARMTHYQAMLLDTDRVQFGPVVALNPATLLPLPEEGAPHDCLEILAETHGTRPDLTDQPIPDADHTWYTDGSSFLQEGQRKAGAAVTTETEVIWAGALPAGTSAQRAELIALTQALKMAEGKRLNVYTDSRYAFATAHIHGEIYRRRGWLTSEGREIKNKSEILALLKALFLPKRLSIIHCLGHQKGDSAEARGNRLADQAAREAAIKTPPDTSTLLIAGKRTADGSEFEKRTADGSEFESPKKKAKVE

SEQ ID NO: 7472 - protein, 2096 aa, synthetic construct
MPAAKRVKLDGGDKKYSIGLDIGTNSVGWAVITDEYKVPSKKFKVLGNTDRHSIKKNLIGALLFDSGETAEATRLKRTARRRYTRRKNRICYLQEIFSNEMAKVDDSFFHRLEESFLVEEDKKHERHPIFGNIVDEVAYHEKYPTIYHLRKKLVDSTDKADLRLIYLALAHMIKFRGHFLIEGDLNPDNSDVDKLFIQLVQTYNQLFEENPINASGVDAKAILSARLSKSRRLENLIAQLPGEKKNGLFGNLIALSLGLTPNFKSNFDLAEDAKLQLSKDTYDDDLDNLLAQIGDQYADLFLAAKNLSDAILLSDILRVNTEITKAPLSASMIKRYDEHHQDLTLLKALVRQQLPEKYKEIFFDQSKNGYAGYIDGGASQEEFYKFIKPILEKMDGTEELLVKLNREDLLRKQRTFDNGSIPHQIHLGELHAILRRQEDFYPFLKDNREKIEKILTFRIPYYVGPLARGNSRFAWMTRKSEETITPWNFEEVVDKGASAQSFIERMTNFDKNLPNEKVLPKHSLLYEYFTVYNELTKVKYVTEGMRKPAFLSGEQKKAIVDLLFKTNRKVTVKQLKEDYFKKIECFDSVEISGVEDRFNASLGTYHDLLKIIKDKDFLDNEENEDILEDIVLTLTLFEDREMIEERLKTYAHLFDDKVMKQLKRRRYTGWGRLSRKLINGIRDKQSGKTILDFLKSDGFANRNFMQLIHDDSLTFKEDIQKAQVSGQGDSLHEHIANLAGSPAIKKGILQTVKVVDELVKVMGRHKPENIVIEMARENQTTQKGQKNSRERMKRIEEGIKELGSQILKEHPVENTQLQNEKLYLYYLQNGRDMYVDQELDINRLSDYDVDHIVPQSFLKDDSIDNKVLTRSDKARGKSDNVPSEEVVKKMKNYWRQLLNAKLITQRKFDNLTKAERGGLSELDKAGFIKRQLVETRQITKHVAQILDSRMNTKYDENDKLIREVKVITLKSKLVSDFRKDFQFYKVREINNYHHAHDAYLNAVVGTALIKKYPKLESEFVYGDYKVYDVRKMIAKSEQEIGKATAKYFFYSNIMNFFKTEITLANGEIRKRPLIETNGETGEIVWDKGRDFATVRKVLSMPQVNIVKKTEVQTGGFSKESILPKRNSDKLIARKKDWDPKKYGGFDSPTVAYSVLVVAKVEKGKSKKLKSVKELLGITIMERSSFEKNPIDFLEAKGYKEVKKDLIIKLPKYSLFELENGRKRMLASAGELQKGNELALPSKYVNFLYLASHYEKLKGSPEDNEQKQLFVEQHKHYLDEIIEQISEFSKRVILADANLDKVLSAYNKHRDKPIREQAENIIHLFTLTNLGAPAAFKYFDTTIDRKRYTSTKEVLDATLIHQSITGLYETRIDLSQLGGDGGGGGPAPEAAAKGGTLGIEDEYRLHETSTEPDVSLGSTWLSDFPQAWAETGGMGLAVRQAPLIIPLKATSTPVSIQQYPMSHEARLGIKPHIQRLLDQGILVPCQSPWNTPLLPVKKPGTNDYRPVQDLREVNKRVEDIHPTVPNPYNLLSGLPPSHQWYTVLDLKDAFFCLRLHPTSQPLFAFEWRDPGMGISGQLTWTRLPQGFKNSPTLFNEALHRDLADFRIQHPDLILLQYVDDILLAATSELDCQQGTRALLQTLGDLGYRASAKKAQICQKQVKYLGYLLREGQRWLTEARKETVMGQPVPKTPRQLREFLGTAGFCRLWIPGFAEMAAPLYPLTKPGTLFSWGPDQQKAYQEIKQALLTAPALGLPDLTKPFELFVDEKQGYAKGVLTQKLGPWRRPVAYLSKKLDPVAAGWPPCLRMVAAIAVLTKDAGKLTMGQPLVILAPHAVEALVKQPPDRWLSNARMTHYQAMLLDTDRVQFGPVVALNPATLLPLPEEGAPHDCLEILAETHGTRPDLTDQPIPDADHTWYTDGSSFLQEGQRKAGAAVTTETEVIWAGALPAGTSAQRAELIALTQALKMAEGKRLNVYTDSRYAFATAHIHGEIYRRRGWLTSEGREIKNKSEILALLKALFLPKRLSIIHCLGHQKGDSAEARGNRLADQAAREAAIKTPPDTSTLLAGKRTADGSEFEKRTADGSEFESPKKKAKVE

SEQ ID NO: 7473 - protein, 2096 aa, synthetic construct; identical to SEQ ID NO: 7471

SEQ ID NO: 7474 - protein, 2096 aa, synthetic construct; identical to SEQ ID NO: 7472

SEQ ID NO: 7475 - protein, 2096 aa, synthetic construct
MPAAKRVKLDGGDKKYSIGLDIGTNSVGWAVITDEYKVPSKKFKVLGNTDRHSIKKNLIGALLFDSGETAEATRLKRTARRRYTRRKNRICYLQEIFSNEMAKVDDSFFHRLEESFLVEEDKKHERHPIFGNIVDEVAYHEKYPTIYHLRKKLVDSTDKADLRLIYLALAHMIKFRGHFLIEGDLNPDNSDVDKLFIQLVQTYNQLFEENPINASGVDAKAILSARLSKSRRLENLIAQLPGEKKNGLFGNLIALSLGLTPNFKSNFDLAEDAKLQLSKDTYDDDLDNLLAQIGDQYADLFLAAKNLSDAILLSDILRVNTEITKAPLSASMIKRYDEHHQDLTLLKALVRQQLPEKYKEIFFDQSKNGYAGYIDGGASQEEFYKFIKPILEKMDGTEELLVKLNREDLLRKQRTFDNGSIPHQIHLGELHAILRRQEDFYPFLKDNREKIEKILTFRIPYYVGPLARGNSRFAWMTRKSEETITPWNFEEVVDKGASAQSFIERMTNFDKNLPNEKVLPKHSLLYEYFTVYNELTKVKYVTEGMRKPAFLSGEQKKAIVDLLFKTNRKVTVKQLKEDYFKKIECFDSVEISGVEDRFNASLGTYHDLLKIIKDKDFLDNEENEDILEDIVLTLTLFEDREMIEERLKTYAHLFDDKVMKQLKRRRYTGWGRLSRKLINGIRDKQSGKTILDFLKSDGFANRNFMQLIHDDSLTFKEDIQKAQVSGQGDSLHEHIANLAGSPAIKKGILQTVKVVDELVKVMGRHKPENIVIEMARENQTTQKGQKNSRERMKRIEEGIKELGSQILKEHPVENTQLQNEKLYLYYLQNGRDMYVDQELDINRLSDYDVDHIVPQSFLKDDSIDNKVLTRSDKARGKSDNVPSEEVVKKMKNYWRQLLNAKLITQRKFDNLTKAERGGLSELDKAGFIKRQLVETRQITKHVAQILDSRMNTKYDENDKLIREVKVITLKSKLVSDFRKDFQFYKVREINNYHHAHDAYLNAVVGTALIKKYPKLESEFVYGDYKVYDVRKMIAKSEQEIGKATAKYFFYSNIMNFFKTEITLANGEIRKRPLIETNGETGEIVWDKGRDFATVRKVLSMPQVNIVKKTEVQTGGFSKESILPKRNSDKLIARKKDWDPKKYGGFDSPTVAYSVLVVAKVEKGKSKKLKSVKELLGITIMERSSFEKNPIDFLEAKGYKEVKKDLIIKLPKYSLFELENGRKRMLASAGELQKGNELALPSKYVNFLYLASHYEKLKGSPEDNEQKQLFVEQHKHYLDEIIEQISEFSKRVILADANLDKVLSAYNKHRDKPIREQAENIIHLFTLTNLGAPAAFKYFDTTIDRKRYTSTKEVLDATLIHQSITGLYETRIDLSQLGGDGGGGGPAPEAAAKGGTLNIEDEYRLHETSKEPDVSLGSTWLSDFPQAWAETGGMGLAVRQAPLIIPLKATSTPVSIKQYPMSQEARLGIKPHIQRLLDQGILVPCQSPWNTPLLPVKKPGTNDYRPVQDLREVNKRVEDIHPTVPNPYNLLSGLPPSHQWYTVLDLKDAFFCLRLHPTSQPLFAFEWRDPEMGISGQLTWTRLPQGFKNSPTLFNEALHRDLAGFRIQHPDLILLQYVDDLLLAATSELDCQQGTRALLQTLGDLGYRASAKKAQICQKQVKYLGYLLKEGQRWLTEARKETVMGQPIPKTPRQLREFLGTAGFCRLWIPGFAEMAAPLYPLTKPGTLFNWGPDQQKAFQEIKQALLTAPALGLPDLTKPFELFVDEKQGYAKGVLTQKLGPWRRPVAYLSKKLDPVAAGWPPCLRMVAAIAVLTKDAGKLTMGQPLVILAPHAVEALVKQPPDRWLSNARMTHYQALLLDTDRVQFGPVVALNPATLLPLPEEGLQHDCLDILAEAHGTRSDLMDQPLPDADHTWYTDGSSFLQEGQRKAGAAVTTETEVIWARALPAGTSAQRAELIALTQALKMAEGKKLNVYTDSRYAFATAHIHGEIYRRRGWLTSEGKEIKNKDEILALLKALFLPKRLSIIHCPGHQKGNSAEARGNRMADQAAREVATRETPETSTLLAGKRTADGSEFEKRTADGSEFESPKKKAKVE

SEQ ID NO: 7476 - protein, 2096 aa, synthetic construct; identical to SEQ ID NO: 4534

SEQ ID NO: 7477 - protein, 2096 aa, synthetic construct
MPAAKRVKLDGGDKKYSIGLDIGTNSVGWAVITDEYKVPSKKFKVLGNTDRHSIKKNLIGALLFDSGETAEATRLKRTARRRYTRRKNRICYLQEIFSNEMAKVDDSFFHRLEESFLVEEDKKHERHPIFGNIVDEVAYHEKYPTIYHLRKKLVDSTDKADLRLIYLALAHMIKFRGHFLIEGDLNPDNSDVDKLFIQLVQTYNQLFEENPINASGVDAKAILSARLSKSRRLENLIAQLPGEKKNGLFGNLIALSLGLTPNFKSNFDLAEDAKLQLSKDTYDDDLDNLLAQIGDQYADLFLAAKNLSDAILLSDILRVNTEITKAPLSASMIKRYDEHHQDLTLLKALVRQQLPEKYKEIFFDQSKNGYAGYIDGGASQEEFYKFIKPILEKMDGTEELLVKLNREDLLRKQRTFDNGSIPHQIHLGELHAILRRQEDFYPFLKDNREKIEKILTFRIPYYVGPLARGNSRFAWMTRKSEETITPWNFEEVVDKGASAQSFIERMTNFDKNLPNEKVLPKHSLLYEYFTVYNELTKVKYVTEGMRKPAFLSGEQKKAIVDLLFKTNRKVTVKQLKEDYFKKIECFDSVEISGVEDRFNASLGTYHDLLKIIKDKDFLDNEENEDILEDIVLTLTLFEDREMIEERLKTYAHLFDDKVMKQLKRRRYTGWGRLSRKLINGIRDKQSGKTILDFLKSDGFANRNFMQLIHDDSLTFKEDIQKAQVSGQGDSLHEHIANLAGSPAIKKGILQTVKVVDELVKVMGRHKPENIVIEMARENQTTQKGQKNSRERMKRIEEGIKELGSQILKEHPVENTQLQNEKLYLYYLQNGRDMYVDQELDINRLSDYDVDHIVPQSFLKDDSIDNKVLTRSDKARGKSDNVPSEEVVKKMKNYWRQLLNAKLITQRKFDNLTKAERGGLSELDKAGFIKRQLVETRQITKHVAQILDSRMNTKYDENDKLIREVKVITLKSKLVSDFRKDFQFYKVREINNYHHAHDAYLNAVVGTALIKKYPKLESEFVYGDYKVYDVRKMIAKSEQEIGKATAKYFFYSNIMNFFKTEITLANGEIRKRPLIETNGETGEIVWDKGRDFATVRKVLSMPQVNIVKKTEVQTGGFSKESILPKRNSDKLIARKKDWDPKKYGGFDSPTVAYSVLVVAKVEKGKSKKLKSVKELLGITIMERSSFEKNPIDFLEAKGYKEVKKDLIIKLPKYSLFELENGRKRMLASAGELQKGNELALPSKYVNFLYLASHYEKLKGSPEDNEQKQLFVEQHKHYLDEIIEQISEFSKRVILADANLDKVLSAYNKHRDKPIREQAENIIHLFTLTNLGAPAAFKYFDTTIDRKRYTSTKEVLDATLIHQSITGLYETRIDLSQLGGDGGGGGPAPEAAAKGGTLNIEDEHRLHETSKEPDVSLGSTWLSDFPQAWAETGGMGLAVRQAPLIIPLKATSTPVSIKQYPMSQEARLGIKPHIQRLLDQGILVPCQSPWNTPLLPVKKPGTNDYRPVQDLREVNKRVEDIHPTVPNPYNLLSGLPPSHQWYTVLDLKDAFFCLRLHPTSQPLFAFEWRDPEMGISGQLTWTRLPQGFKNSPTLFDEALHRDLADFRIQHPDLILLQYVDDLLLAATSELDCQQGTRALLQTLGNLGYRASAKKAQICQKQVKYLGYLLKEGQRWLTEARKETVMGQPTPKTPRQLREFLGTAGFCRLWIPGFAEMAAPLYPLTKTGTLFNWGPDQQKAYQEIKQALLTAPALGLPDLTKPFELFVDEKQGYAKGVLTQKLGPWRRPVAYLSKKLDPVAAGWPPCLRMVAAIAVLTKDAGKLTMGQPLVILAPHAVEALVKQPPDRWLSNARMTHYQALLLDTDRVQFGPVVALNPATLLPLPEEGLQHNCLDILAEAHGTRPDLTDQPLPDADHTWYTDGSSLLQEGQRKAGAAVTTETEVIWAKALPAGTSAQRAELIALTQALKMAEGKKLNVYTDSRYAFATAHIHGEIYRRRGLLTSEGKEIKNKDEILALLKALFLPKRLSIIHCPGHQKGHSAEARGNRMADQAARKAAITETPDTSTLLAGKRTADGSEFEKRTADGSEFESPKKKAKVE

SEQ ID NO: 7478 - protein, 2096 aa, synthetic construct; identical to SEQ ID NO: 4534

SEQ ID NO: 7479 - protein, 2088 aa, synthetic construct
MPAAKRVKLDGGDKKYSIGLDIGTNSVGWAVITDEYKVPSKKFKVLGNTDRHSIKKNLIGALLFDSGETAEATRLKRTARRRYTRRKNRICYLQEIFSNEMAKVDDSFFHRLEESFLVEEDKKHERHPIFGNIVDEVAYHEKYPTIYHLRKKLVDSTDKADLRLIYLALAHMIKFRGHFLIEGDLNPDNSDVDKLFIQLVQTYNQLFEENPINASGVDAKAILSARLSKSRRLENLIAQLPGEKKNGLFGNLIALSLGLTPNFKSNFDLAEDAKLQLSKDTYDDDLDNLLAQIGDQYADLFLAAKNLSDAILLSDILRVNTEITKAPLSASMIKRYDEHHQDLTLLKALVRQQLPEKYKEIFFDQSKNGYAGYIDGGASQEEFYKFIKPILEKMDGTEELLVKLNREDLLRKQRTFDNGSIPHQIHLGELHAILRRQEDFYPFLKDNREKIEKILTFRIPYYVGPLARGNSRFAWMTRKSEETITPWNFEEVVDKGASAQSFIERMTNFDKNLPNEKVLPKHSLLYEYFTVYNELTKVKYVTEGMRKPAFLSGEQKKAIVDLLFKTNRKVTVKQLKEDYFKKIECFDSVEISGVEDRFNASLGTYHDLLKIIKDKDFLDNEENEDILEDIVLTLTLFEDREMIEERLKTYAHLFDDKVMKQLKRRRYTGWGRLSRKLINGIRDKQSGKTILDFLKSDGFANRNFMQLIHDDSLTFKEDIQKAQVSGQGDSLHEHIANLAGSPAIKKGILQTVKVVDELVKVMGRHKPENIVIEMARENQTTQKGQKNSRERMKRIEEGIKELGSQILKEHPVENTQLQNEKLYLYYLQNGRDMYVDQELDINRLSDYDVDHIVPQSFLKDDSIDNKVLTRSDKARGKSDNVPSEEVVKKMKNYWRQLLNAKLITQRKFDNLTKAERGGLSELDKAGFIKRQLVETRQITKHVAQILDSRMNTKYDENDKLIREVKVITLKSKLVSDFRKDFQFYKVREINNYHHAHDAYLNAVVGTALIKKYPKLESEFVYGDYKVYDVRKMIAKSEQEIGKATAKYFFYSNIMNFFKTEITLANGEIRKRPLIETNGETGEIVWDKGRDFATVRKVLSMPQVNIVKKTEVQTGGFSKESILPKRNSDKLIARKKDWDPKKYGGFDSPTVAYSVLVVAKVEKGKSKKLKSVKELLGITIMERSSFEKNPIDFLEAKGYKEVKKDLIIKLPKYSLFELENGRKRMLASAGELQKGNELALPSKYVNFLYLASHYEKLKGSPEDNEQKQLFVEQHKHYLDEIIEQISEFSKRVILADANLDKVLSAYNKHRDKPIREQAENIIHLFTLTNLGAPAAFKYFDTTIDRKRYTSTKEVLDATLIHQSITGLYETRIDLSQLGGDGGGGGPAPEAAAKGGLDDEYRLYSPLVKPDQNIQFWLEQFPQAWAETAGMGLAKQVPPQVIQLKASATPVSVRQYPLSKEAQEGIRPHVQRLIQQGILVPVQSPWNTPLLPVRKPGTNDYRPVQDLREVNKRVQDIHPTVPNPYNLLCALPPQRSWYTVLDLKDAFFCLRLHPTSQPLFAFEWRDPGTGRTGQLTWTRLPQGFKNSPTIFNEALHRDLANFRIQHPQVTLLQYVDDLLLAGATKQDCLEGTKALLLELSDLGYRASAKKAQICRREVTYLGYSLRDGQRWLTEARKKTVVQIPAPTTAKQVREFLGKAGFCRLFIPGFATLAAPLYPLTKPKGEFSWAPEHQKAFDAIKKALLSAPALALPDVTKPFTLYVDERKGVARGVLTQTLGPWRRPVAYLSKKLDPVASGWPVCLKAIAAVAILVKDADKLTLGQNITVIAPHALENIVRQPPDRWMTNARMTHYQSLLLTERVTFAPPAALNPATLLPEETDEPVTHDCHQLLIEETGVRKDLTDIPLTGEVLTWFTDGSSYVVEGKRMAGAAVVDGTRTIWASSLPEGTSAQKAELMALTQALRLAEGKSINIYTDSRYAFATAHVHGAIYKQRGWLTSAGREIKNKEEILSLLEALHLPKRLAIIHCPGHQKAKDPISRGNQMADRVAKQAAQGVNLLPAGKRTADGSEFEKRTADGSEFESPKKKAKVE

SEQ ID NO: 7480 - protein, 2088 aa, synthetic construct; identical to SEQ ID NO: 7479

SEQ ID NO: 7481 - protein, 2090 aa, synthetic construct
MPAAKRVKLDGGDKKYSIGLDIGTNSVGWAVITDEYKVPSKKFKVLGNTDRHSIKKNLIGALLFDSGETAEATRLKRTARRRYTRRKNRICYLQEIFSNEMAKVDDSFFHRLEESFLVEEDKKHERHPIFGNIVDEVAYHEKYPTIYHLRKKLVDSTDKADLRLIYLALAHMIKFRGHFLIEGDLNPDNSDVDKLFIQLVQTYNQLFEENPINASGVDAKAILSARLSKSRRLENLIAQLPGEKKNGLFGNLIALSLGLTPNFKSNFDLAEDAKLQLSKDTYDDDLDNLLAQIGDQYADLFLAAKNLSDAILLSDILRVNTEITKAPLSASMIKRYDEHHQDLTLLKALVRQQLPEKYKEIFFDQSKNGYAGYIDGGASQEEFYKFIKPILEKMDGTEELLVKLNREDLLRKQRTFDNGSIPHQIHLGELHAILRRQEDFYPFLKDNREKIEKILTFRIPYYVGPLARGNSRFAWMTRKSEETITPWNFEEVVDKGASAQSFIERMTNFDKNLPNEKVLPKHSLLYEYFTVYNELTKVKYVTEGMRKPAFLSGEQKKAIVDLLFKTNRKVTVKQLKEDYFKKIECFDSVEISGVEDRFNASLGTYHDLLKIIKDKDFLDNEENEDILEDIVLTLTLFEDREMIEERLKTYAHLFDDKVMKQLKRRRYTGWGRLSRKLINGIRDKQSGKTILDFLKSDGFANRNFMQLIHDDSLTFKEDIQKAQVSGQGDSLHEHIANLAGSPAIKKGILQTVKVVDELVKVMGRHKPENIVIEMARENQTTQKGQKNSRERMKRIEEGIKELGSQILKEHPVENTQLQNEKLYLYYLQNGRDMYVDQELDINRLSDYDVDHIVPQSFLKDDSIDNKVLTRSDKARGKSDNVPSEEVVKKMKNYWRQLLNAKLITQRKFDNLTKAERGGLSELDKAGFIKRQLVETRQITKHVAQILDSRMNTKYDENDKLIREVKVITLKSKLVSDFRKDFQFYKVREINNYHHAHDAYLNAVVGTALIKKYPKLESEFVYGDYKVYDVRKMIAKSEQEIGKATAKYFFYSNIMNFFKTEITLANGEIRKRPLIETNGETGEIVWDKGRDFATVRKVLSMPQVNIVKKTEVQTGGFSKESILPKRNSDKLIARKKDWDPKKYGGFDSPTVAYSVLVVAKVEKGKSKKLKSVKELLGITIMERSSFEKNPIDFLEAKGYKEVKKDLIIKLPKYSLFELENGRKRMLASAGELQKGNELALPSKYVNFLYLASHYEKLKGSPEDNEQKQLFVEQHKHYLDEIIEQISEFSKRVILADANLDKVLSAYNKHRDKPIREQAENIIHLFTLTNLGAPAAFKYFDTTIDRKRYTSTKEVLDATLIHQSITGLYETRIDLSQLGGDGGGGGPAPEAAAKGGTLQLDDEYRLYSPLVKPDQNIQFWLEQFPQAWAETAGMGLAKQVPPQVIQLKASATPVSVRQYPLSKEAQEGIRPHVQRLIQQGILVPVQSPWNTPLLPVRKPGTNDYRPVQDLREVNKRVQDIHPTVPNPYNLLCALPPQRSWYTVLDLKDAFFCLRLHPTSQPLFAFEWRDPGTGRTGQLTWTRLPQGFKNSPTIFDEALHRDLANFRIQHPQVTLLQYVDDLLLAGATKQDCLEGTKALLLELSDLGYRASAKKAQICRREVTYLGYSLRDGQRWLTEARKKTVVQIPAPTTAKQVREFLGTAGFCRLWIPGFATLAAPLYPLTKEKGEFSWAPEHQKAFDAIKKALLSAPALALPDVTKPFTLYVDERKGVARGVLTQTLGPWRRPVAYLSKKLDPVASGWPVCLKAIAAVAILVKDADKLTLGQNITVIAPHALENIVRQPPDRWMTNARMTHYQSLLLTERVTFAPPAALNPATLLPEETDEPVTHDCHQLLIEETGVRKDLTDIPLTGEVLTWFTDGSSYVVEGKRMAGAAVVDGTRTIWASSLPEGTSAQKAELMALTQALRLAEGKSINIYTDSRYAFATAHVHGAIYKQRGLLTSAGREIKNKEEILSLLEALHLPKRLAIIHCPGHQKAKDPISRGNQMADRVAKQAAQGVNLLAGKRTADGSEFEKRTADGSEFESPKKKAKVE

SEQ ID NO: 7482 - protein, 2176 aa, synthetic construct
MPAAKRVKLDGGDKKYSIGLDIGTNSVGWAVITDEYKVPSKKFKVLGNTDRHSIKKNLIGALLFDSGETAEATRLKRTARRRYTRRKNRICYLQEIFSNEMAKVDDSFFHRLEESFLVEEDKKHERHPIFGNIVDEVAYHEKYPTIYHLRKKLVDSTDKADLRLIYLALAHMIKFRGHFLIEGDLNPDNSDVDKLFIQLVQTYNQLFEENPINASGVDAKAILSARLSKSRRLENLIAQLPGEKKNGLFGNLIALSLGLTPNFKSNFDLAEDAKLQLSKDTYDDDLDNLLAQIGDQYADLFLAAKNLSDAILLSDILRVNTEITKAPLSASMIKRYDEHHQDLTLLKALVRQQLPEKYKEIFFDQSKNGYAGYIDGGASQEEFYKFIKPILEKMDGTEELLVKLNREDLLRKQRTFDNGSIPHQIHLGELHAILRRQEDFYPFLKDNREKIEKILTFRIPYYVGPLARGNSRFAWMTRKSEETITPWNFEEVVDKGASAQSFIERMTNFDKNLPNEKVLPKHSLLYEYFTVYNELTKVKYVTEGMRKPAFLSGEQKKAIVDLLFKTNRKVTVKQLKEDYFKKIECFDSVEISGVEDRFNASLGTYHDLLKIIKDKDFLDNEENEDILEDIVLTLTLFEDREMIEERLKTYAHLFDDKVMKQLKRRRYTGWGRLSRKLINGIRDKQSGKTILDFLKSDGFANRNFMQLIHDDSLTFKEDIQKAQVSGQGDSLHEHIANLAGSPAIKKGILQTVKVVDELVKVMGRHKPENIVIEMARENQTTQKGQKNSRERMKRIEEGIKELGSQILKEHPVENTQLQNEKLYLYYLQNGRDMYVDQELDINRLSDYDVDHIVPQSFLKDDSIDNKVLTRSDKARGKSDNVPSEEVVKKMKNYWRQLLNAKLITQRKFDNLTKAERGGLSELDKAGFIKRQLVETRQITKHVAQILDSRMNTKYDENDKLIREVKVITLKSKLVSDFRKDFQFYKVREINNYHHAHDAYLNAVVGTALIKKYPKLESEFVYGDYKVYDVRKMIAKSEQEIGKATAKYFFYSNIMNFFKTEITLANGEIRKRPLIETNGETGEIVWDKGRDFATVRKVLSMPQVNIVKKTEVQTGGFSKESILPKRNSDKLIARKKDWDPKKYGGFDSPTVAYSVLVVAKVEKGKSKKLKSVKELLGITIMERSSFEKNPIDFLEAKGYKEVKKDLIIKLPKYSLFELENGRKRMLASAGELQKGNELALPSKYVNFLYLASHYEKLKGSPEDNEQKQLFVEQHKHYLDEIIEQISEFSKRVILADANLDKVLSAYNKHRDKPIREQAENIIHLFTLTNLGAPAAFKYFDTTIDRKRYTSTKEVLDATLIHQSITGLYETRIDLSQLGGDGGGGGPAPEAAAKGGMDPLQLLQPLEAEIKGTKLKAHWNSGATITCVPEAFLEDERPIQTMLIKTIHGEKQQDVYYLTFKVQGRKVEAEVLASPYDYILLNPSDVPWLMKKPLQLTVLVPLHEYQERLLQQTALPKEQKELLQKLFLKYDALWQHWENQVGHRRIKPHNIATGTLAPRPQKQYPINPKAKPSIQIVIDDLLKQGVLIQQNSTMNTPVYPVPKPDGKWRMVLDYREVNKTIPLIAAQNQHSAGILSSIYRGKYKTTLDLTNGFWAHPITPESYWLTAFTWQGKQYCWTRLPQGFLNSPALFNADVVDLLKEIPNVQAYVDDIYISHDDPQEHLEQLEKIFSILLNAGYVVSLKKSEIAQREVEFLGFNITKEGRGLTDTFKQKLLNITPPKDLKQLQSILGKLNFARNFIPNYSELVKPLYTIVAPANGKFISWTEDNSNQLQHIISVLNQADNLEERNPETRLIIKVNSSPSAGYIRYYNEGSKRPIMYVNYIFSKAEAKFTQTEKLLTTMHKGLIKAMDLAMGQEILVYSPIVSMTKIQRTPLPERKALPVRWITWMTYLEDPRIQFHYDKSLPELQQIPNVTEDVIAKTKHPSEFAMVFYTDGSAIKHPDVNKSHSAGMGIAQVQFIPEYKIVHQWSIPLGDHTAQLAEIAAVEFACKKALKISGPVLIVTDSFYVAESANKELPYWKSNGFLNNKKKPLRHVSKWKSIAECLQLKPDIIIMHEKGHQQPMTTLHTEGNNLADKLATQGSYVVHAGKRTADGSEFEKRTADGSEFESPKKKAKVE

SEQ ID NO: 7483 - protein, 2176 aa, synthetic construct
MPAAKRVKLDGGDKKYSIGLDIGTNSVGWAVITDEYKVPSKKFKVLGNTDRHSIKKNLIGALLFDSGETAEATRLKRTARRRYTRRKNRICYLQEIFSNEMAKVDDSFFHRLEESFLVEEDKKHERHPIFGNIVDEVAYHEKYPTIYHLRKKLVDSTDKADLRLIYLALAHMIKFRGHFLIEGDLNPDNSDVDKLFIQLVQTYNQLFEENPINASGVDAKAILSARLSKSRRLENLIAQLPGEKKNGLFGNLIALSLGLTPNFKSNFDLAEDAKLQLSKDTYDDDLDNLLAQIGDQYADLFLAAKNLSDAILLSDILRVNTEITKAPLSASMIKRYDEHHQDLTLLKALVRQQLPEKYKEIFFDQSKNGYAGYIDGGASQEEFYKFIKPILEKMDGTEELLVKLNREDLLRKQRTFDNGSIPHQIHLGELHAILRRQEDFYPFLKDNREKIEKILTFRIPYYVGPLARGNSRFAWMTRKSEETITPWNFEEVVDKGASAQSFIERMTNFDKNLPNEKVLPKHSLLYEYFTVYNELTKVKYVTEGMRKPAFLSGEQKKAIVDLLFKTNRKVTVKQLKEDYFKKIECFDSVEISGVEDRFNASLGTYHDLLKIIKDKDFLDNEENEDILEDIVLTLTLFEDREMIEERLKTYAHLFDDKVMKQLKRRRYTGWGRLSRKLINGIRDKQSGKTILDFLKSDGFANRNFMQLIHDDSLTFKEDIQKAQVSGQGDSLHEHIANLAGSPAIKKGILQTVKVVDELVKVMGRHKPENIVIEMARENQTTQKGQKNSRERMKRIEEGIKELGSQILKEHPVENTQLQNEKLYLYYLQNGRDMYVDQELDINRLSDYDVDHIVPQSFLKDDSIDNKVLTRSDKARGKSDNVPSEEVVKKMKNYWRQLLNAKLITQRKFDNLTKAERGGLSELDKAGFIKRQLVETRQITKHVAQILDSRMNTKYDENDKLIREVKVITLKSKLVSDFRKDFQFYKVREINNYHHAHDAYLNAVVGTALIKKYPKLESEFVYGDYKVYDVRKMIAKSEQEIGKATAKYFFYSNIMNFFKTEITLANGEIRKRPLIETNGETGEIVWDKGRDFATVRKVLSMPQVNIVKKTEVQTGGFSKESILPKRNSDKLIARKKDWDPKKYGGFDSPTVAYSVLVVAKVEKGKSKKLKSVKELLGITIMERSSFEKNPIDFLEAKGYKEVKKDLIIKLPKYSLFELENGRKRMLASAGELQKGNELALPSKYVNFLYLASHYEKLKGSPEDNEQKQLFVEQHKHYLDEIIEQISEFSKRVILADANLDKVLSAYNKHRDKPIREQAENIIHLFTLTNLGAPAAFKYFDTTIDRKRYTSTKEVLDATLIHQSITGLYETRIDLSQLGGDGGGGGPAPEAAAKGGMNPLQLLQPLPAEVKGTKLLAHWNSGATITCIPESFLEDEQPIKQTLIKTIHGEKQQNVYYLTFKVKGRKVEAEVIASPYEYILLSPTDVPWLTQQPLQLTILVPLQEYQDRILNKTALPEEQKQQLKALFTKYDNLWQHWENQVGHRKIRPHNIATGDYPPRPQKQYPINPKAKPSIQIVIDDLLKQGVLTPQNSTMNTPVYPVPKPDGRWRMVLDYREVNKTIPLTAAQNQHSAGILATIVRQKYKTTLDLANGFWAHPITPDSYWLTAFTWQGKQYCWTRLPQGFLNSPALFNADAVDLLKEVPNVQVYVDDIYLSHDNPHEHIQQLEKVFQILLQAGYVVSLKKSEIGQRTVEFLGFNITKEGRGLTDTFKTKLLNVTPPKDLKQLQSILGLLNFARNFIPNFAELVQTLYNLIASSPGKYIEWTEDNTKQLNKVIEALNTASNLEERLPDQRLVIKVNTSPSAGYVRYYNESGKKPIMYLNYVFSKAELKFSMLEKLLTTMHKALIKAMDLAMGQEILVYSPIVSMTKIQKTPLPERKALPIRWITWMTYLEDPRIQFHYDKTLPELKHIPDVYTSSIPPLKHPSQYEGVFCTDGSAIKSPDPTKSNNAGMGIVHAIYNPEYKILNQWSIPLGHHTAQMAEIAAVEFACKKALKVPGPVLVITDSFYVAESANKELPYWKSNGFVNNKKEPLKHISKWKSIAECLSIKPDITIQHEKGHQPINTSIHTEGNALADKLATQGSYVVNAGKRTADGSEFEKRTADGSEFESPKKKAKVE

SEQ ID NO: 7484 - protein, 2094 aa, synthetic construct
MPAAKRVKLDGGDKKYSIGLDIGTNSVGWAVITDEYKVPSKKFKVLGNTDRHSIKKNLIGALLFDSGETAEATRLKRTARRRYTRRKNRICYLQEIFSNEMAKVDDSFFHRLEESFLVEEDKKHERHPIFGNIVDEVAYHEKYPTIYHLRKKLVDSTDKADLRLIYLALAHMIKFRGHFLIEGDLNPDNSDVDKLFIQLVQTYNQLFEENPINASGVDAKAILSARLSKSRRLENLIAQLPGEKKNGLFGNLIALSLGLTPNFKSNFDLAEDAKLQLSKDTYDDDLDNLLAQIGDQYADLFLAAKNLSDAILLSDILRVNTEITKAPLSASMIKRYDEHHQDLTLLKALVRQQLPEKYKEIFFDQSKNGYAGYIDGGASQEEFYKFIKPILEKMDGTEELLVKLNREDLLRKQRTFDNGSIPHQIHLGELHAILRRQEDFYPFLKDNREKIEKILTFRIPYYVGPLARGNSRFAWMTRKSEETITPWNFEEVVDKGASAQSFIERMTNFDKNLPNEKVLPKHSLLYEYFTVYNELTKVKYVTEGMRKPAFLSGEQKKAIVDLLFKTNRKVTVKQLKEDYFKKIECFDSVEISGVEDRFNASLGTYHDLLKIIKDKDFLDNEENEDILEDIVLTLTLFEDREMIEERLKTYAHLFDDKVMKQLKRRRYTGWGRLSRKLINGIRDKQSGKTILDFLKSDGFANRNFMQLIHDDSLTFKEDIQKAQVSGQGDSLHEHIANLAGSPAIKKGILQTVKVVDELVKVMGRHKPENIVIEMARENQTTQKGQKNSRERMKRIEEGIKELGSQILKEHPVENTQLQNEKLYLYYLQNGRDMYVDQELDINRLSDYDVDHIVPQSFLKDDSIDNKVLTRSDKARGKSDNVPSEEVVKKMKNYWRQLLNAKLITQRKFDNLTKAERGGLSELDKAGFIKRQLVETRQITKHVAQILDSRMNTKYDENDKLIREVKVITLKSKLVSDFRKDFQFYKVREINNYHHAHDAYLNAVVGTALIKKYPKLESEFVYGDYKVYDVRKMIAKSEQEIGKATAKYFFYSNIMNFFKTEITLANGEIRKRPLIETNGETGEIVWDKGRDFATVRKVLSMPQVNIVKKTEVQTGGFSKESILPKRNSDKLIARKKDWDPKKYGGFDSPTVAYSVLVVAKVEKGKSKKLKSVKELLGITIMERSSFEKNPIDFLEAKGYKEVKKDLIIKLPKYSLFELENGRKRMLASAGELQKGNELALPSKYVNFLYLASHYEKLKGSPEDNEQKQLFVEQHKHYLDEIIEQISEFSKRVILADANLDKVLSAYNKHRDKPIREQAENIIHLFTLTNLGAPAAFKYFDTTIDRKRYTSTKEVLDATLIHQSITGLYETRIDLSQLGGDGGGGGPAPEAAAKGGVLNLEEEYRLHEKPVPSSIDPSWLQLFPTVWAERAGMGLANQVPPVVVELRSGASPVAVRQYPMSKEAREGIRPHIQRFLDLGVLVPCQSPWNTPLLPVKKPGTNDYRPVQDLREINKRVQDIHPTVPNPYNLLSSLPPSHTWYSVLDLKDAFFCLKLHPNSQPLFAFEWRDPEKGNTGQLTWTRLPQGFKNSPTLFNEALHRDLAPFRALNPQVVLLQYVDDLLVAAPTYRDCKEGTQKLLQELSKLGYRVSAKKAQLCQKEVTYLGYLLKEGKRWLTPARKATVMKIPPPTTPRQVREFLGKAGFCRLFIPGFASLAAPLYPLTKPSIPFIWTEEHQKAFDRIKEALLSAPALALPDLTKPFTLYVDERAGVARGVLTQTLGPWRRPVAYLSKKLDPVASGWPTCLKAVAAVALLLKDADKLTLGQNVTVIASHSLESIVRQPPDRWMTNARMTHYQSLLLNERVSFAPPAVLNPATLLPVESEATPVHRCSEILAEETGTRRDLKDQPLPGVPAWYTDGSSFIAEGKRRAGAAIVDGKRTVWASSLPEGTSAQKAELVALTQALRLAEGKDINIYTDSRYAFATAHIHGAIYKQRGWLTSAGKDIKNKEEILALLEAIHLPKRVAIIHCPGHQKGNDPVATGNRRADEAAKQAALSTRVLAETTKPAGKRTADGSEFEKRTADGSEFESPKKKAKVE

SEQ ID NO: 7485 - protein, 2096 aa, synthetic construct
MPAAKRVKLDGGDKKYSIGLDIGTNSVGWAVITDEYKVPSKKFKVLGNTDRHSIKKNLIGALLFDSGETAEATRLKRTARRRYTRRKNRICYLQEIFSNEMAKVDDSFFHRLEESFLVEEDKKHERHPIFGNIVDEVAYHEKYPTIYHLRKKLVDSTDKADLRLIYLALAHMIKFRGHFLIEGDLNPDNSDVDKLFIQLVQTYNQLFEENPINASGVDAKAILSARLSKSRRLENLIAQLPGEKKNGLFGNLIALSLGLTPNFKSNFDLAEDAKLQLSKDTYDDDLDNLLAQIGDQYADLFLAAKNLSDAILLSDILRVNTEITKAPLSASMIKRYDEHHQDLTLLKALVRQQLPEKYKEIFFDQSKNGYAGYIDGGASQEEFYKFIKPILEKMDGTEELLVKLNREDLLRKQRTFDNGSIPHQIHLGELHAILRRQEDFYPFLKDNREKIEKILTFRIPYYVGPLARGNSRFAWMTRKSEETITPWNFEEVVDKGASAQSFIERMTNFDKNLPNEKVLPKHSLLYEYFTVYNELTKVKYVTEGMRKPAFLSGEQKKAIVDLLFKTNRKVTVKQLKEDYFKKIECFDSVEISGVEDRFNASLGTYHDLLKIIKDKDFLDNEENEDILEDIVLTLTLFEDREMIEERLKTYAHLFDDKVMKQLKRRRYTGWGRLSRKLINGIRDKQSGKTILDFLKSDGFANRNFMQLIHDDSLTFKEDIQKAQVSGQGDSLHEHIANLAGSPAIKKGILQTVKVVDELVKVMGRHKPENIVIEMARENQTTQKGQKNSRERMKRIEEGIKELGSQILKEHPVENTQLQNEKLYLYYLQNGRDMYVDQELDINRLSDYDVDHIVPQSFLKDDSIDNKVLTRSDKARGKSDNVPSEEVVKKMKNYWRQLLNAKLITQRKFDNLTKAERGGLSELDKAGFIKRQLVETRQITKHVAQILDSRMNTKYDENDKLIREVKVITLKSKLVSDFRKDFQFYKVREINNYHHAHDAYLNAVVGTALIKKYPKLESEFVYGDYKVYDVRKMIAKSEQEIGKATAKYFFYSNIMNFFKTEITLANGEIRKRPLIETNGETGEIVWDKGRDFATVRKVLSMPQVNIVKKTEVQTGGFSKESILPKRNSDKLIARKKDWDPKKYGGFDSPTVAYSVLVVAKVEKGKSKKLKSVKELLGITIMERSSFEKNPIDFLEAKGYKEVKKDLIIKLPKYSLFELENGRKRMLASAGELQKGNELALPSKYVNFLYLASHYEKLKGSPEDNEQKQLFVEQHKHYLDEIIEQISEFSKRVILADANLDKVLSAYNKHRDKPIREQAENIIHLFTLTNLGAPAAFKYFDTTIDRKRYTSTKEVLDATLIHQSITGLYETRIDLSQLGGDGGGGGPAPEAAAKGGTLNIEDEYRLHETSKEPDVPLGSTWLSDFPQAWAETGGMGLAVRQAPLIIPLKATSTPVSIKQYPMSQEARLGIKPHIQRLLDQGILVPCQSPWNTPLLPVKKPGTNDYRPVQDLREVNKRVEDIHPTVPNPYNLLSGLPPSHQWYTVLDLKDAFFCLRLHPTSQPLFAFEWRDPEMGISGQLTWTRLPQGFKNSPTLFNEALHRDLADFRIQHPDLILLQYVDDLLLAATSEQDCQRGTRALLQTLGNLGYRASAKKAQICQKQVKYLGYLLKEGQRWLTEARKETVMGQPTPKTPRQLREFLGTAGFCRLWIPGFAEMAAPLYPLTKPGTLFNWGPDQQKAYQEIKQALLTAPALGLPDLTKPFELFVDEKQGYAKGVLTQKLGPWRRPVAYLSKKLDPVAAGWPPCLRMVAAIAVLTKDAGKLTMGQPLVILAPHAVEALVKQPPDRWLSNARMTHYQAMLLDTDRVQFGPVVALNPATLLPLPEKEAPHDCLEILAETHGTRPDLTDQPIPDADYTWYTDGSSFLQEGQRRAGAAVTTETEVIWARALPAGTSAQRAELIALTQALKMAEGKKLNVYTDSRYAFATAHVHGEIYRRRGWLTSEGREIKNKNEILALLKALFLPKRLSIIHCPGHQKGNSAEARGNRMADQAAREAAMKAVLETSTLLAGKRTADGSEFEKRTADGSEFESPKKKAKVE

SEQ ID NO: 7486 - protein, 2098 aa, synthetic construct
MPAAKRVKLDGGDKKYSIGLDIGTNSVGWAVITDEYKVPSKKFKVLGNTDRHSIKKNLIGALLFDSGETAEATRLKRTARRRYTRRKNRICYLQEIFSNEMAKVDDSFFHRLEESFLVEEDKKHERHPIFGNIVDEVAYHEKYPTIYHLRKKLVDSTDKADLRLIYLALAHMIKFRGHFLIEGDLNPDNSDVDKLFIQLVQTYNQLFEENPINASGVDAKAILSARLSKSRRLENLIAQLPGEKKNGLFGNLIALSLGLTPNFKSNFDLAEDAKLQLSKDTYDDDLDNLLAQIGDQYADLFLAAKNLSDAILLSDILRVNTEITKAPLSASMIKRYDEHHQDLTLLKALVRQQLPEKYKEIFFDQSKNGYAGYIDGGASQEEFYKFIKPILEKMDGTEELLVKLNREDLLRKQRTFDNGSIPHQIHLGELHAILRRQEDFYPFLKDNREKIEKILTFRIPYYVGPLARGNSRFAWMTRKSEETITPWNFEEVVDKGASAQSFIERMTNFDKNLPNEKVLPKHSLLYEYFTVYNELTKVKYVTEGMRKPAFLSGEQKKAIVDLLFKTNRKVTVKQLKEDYFKKIECFDSVEISGVEDRFNASLGTYHDLLKIIKDKDFLDNEENEDILEDIVLTLTLFEDREMIEERLKTYAHLFDDKVMKQLKRRRYTGWGRLSRKLINGIRDKQSGKTILDFLKSDGFANRNFMQLIHDDSLTFKEDIQKAQVSGQGDSLHEHIANLAGSPAIKKGILQTVKVVDELVKVMGRHKPENIVIEMARENQTTQKGQKNSRERMKRIEEGIKELGSQILKEHPVENTQLQNEKLYLYYLQNGRDMYVDQELDINRLSDYDVDHIVPQSFLKDDSIDNKVLTRSDKARGKSDNVPSEEVVKKMKNYWRQLLNAKLITQRKFDNLTKAERGGLSELDKAGFIKRQLVETRQITKHVAQILDSRMNTKYDENDKLIREVKVITLKSKLVSDFRKDFQFYKVREINNYHHAHDAYLNAVVGTALIKKYPKLESEFVYGDYKVYDVRKMIAKSEQEIGKATAKYFFYSNIMNFFKTEITLANGEIRKRPLIETNGETGEIVWDKGRDFATVRKVLSMPQVNIVKKTEVQTGGFSKESILPKRNSDKLIARKKDWDPKKYGGFDSPTVAYSVLVVAKVEKGKSKKLKSVKELLGITIMERSSFEKNPIDFLEAKGYKEVKKDLIIKLPKYSLFELENGRKRMLASAGELQKGNELALPSKYVNFLYLASHYEKLKGSPEDNEQKQLFVEQHKHYLDEIIEQISEFSKRVILADANLDKVLSAYNKHRDKPIREQAENIIHLFTLTNLGAPAAFKYFDTTIDRKRYTSTKEVLDATLIHQSITGLYETRIDLSQLGGDGGEAAAKGGGPAPGGTAPLEEEYRLFLEAPIQNVTLLEQWKREIPKVWAEINPPGLASTQAPIHVQLLSTALPVRVRQYPITLEAKRSLRETIRKFRAAGILRPVHSPWNTPLLPVRKSGTSEYRMVQDLREVNKRVETIHPTVPNPYTLLSLLPPDRIWYSVLDLKDAFFCIPLAPESQLIFAFEWADAEEGESGQLTWTRLPQGFKNSPTLFDEALNRDLQGFRLDHPSVSLLQYVDDLLIAADTQAACLSATRDLLMTLAELGYRVSGKKAQLCQEEVTYLGFKIHKGSRSLSNSRTQAILQIPVPKTKRQVREFLGTIGYCRLWIPGFAELAQPLYAATRGGNDPLVWGEKEEEAFQSLKLALTQPPALALPSLDKPFQLFVEETSGAAKGVLTQALGPWKRPVAYLSKRLDPVAAGWPRCLRAIAAAALLTREASKLTFGQDIEITSSHNLESLLRSPPDKWLTNARITQYQVLLLDPPRVRFKQTAALNPATLLPETDDTLPIHHCLDTLDSLTSTRPDLTDQPLAQAEATLFTDGSSYIRDGKRYAGAAVVTLDSVIWAEPLPIGTSAQKAELIALTKALEWSKDKSVNIYTDSRYAFATLHVHGMIYRERGLLTAGGKAIKNAPEILALLTAVWLPKRVAVMHCKGHQKDDAPTSTGNRRADEVAREVAIRPLSTQATISAGKRTADGSEFEKRTADGSEFESPKKKAKVE

SEQ ID NO: 7487 - protein, 2098 aa, synthetic construct
MPAAKRVKLDGGDKKYSIGLDIGTNSVGWAVITDEYKVPSKKFKVLGNTDRHSIKKNLIGALLFDSGETAEATRLKRTARRRYTRRKNRICYLQEIFSNEMAKVDDSFFHRLEESFLVEEDKKHERHPIFGNIVDEVAYHEKYPTIYHLRKKLVDSTDKADLRLIYLALAHMIKFRGHFLIEGDLNPDNSDVDKLFIQLVQTYNQLFEENPINASGVDAKAILSARLSKSRRLENLIAQLPGEKKNGLFGNLIALSLGLTPNFKSNFDLAEDAKLQLSKDTYDDDLDNLLAQIGDQYADLFLAAKNLSDAILLSDILRVNTEITKAPLSASMIKRYDEHHQDLTLLKALVRQQLPEKYKEIFFDQSKNGYAGYIDGGASQEEFYKFIKPILEKMDGTEELLVKLNREDLLRKQRTFDNGSIPHQIHLGELHAILRRQEDFYPFLKDNREKIEKILTFRIPYYVGPLARGNSRFAWMTRKSEETITPWNFEEVVDKGASAQSFIERMTNFDKNLPNEKVLPKHSLLYEYFTVYNELTKVKYVTEGMRKPAFLSGEQKKAIVDLLFKTNRKVTVKQLKEDYFKKIECFDSVEISGVEDRFNASLGTYHDLLKIIKDKDFLDNEENEDILEDIVLTLTLFEDREMIEERLKTYAHLFDDKVMKQLKRRRYTGWGRLSRKLINGIRDKQSGKTILDFLKSDGFANRNFMQLIHDDSLTFKEDIQKAQVSGQGDSLHEHIANLAGSPAIKKGILQTVKVVDELVKVMGRHKPENIVIEMARENQTTQKGQKNSRERMKRIEEGIKELGSQILKEHPVENTQLQNEKLYLYYLQNGRDMYVDQELDINRLSDYDVDHIVPQSFLKDDSIDNKVLTRSDKARGKSDNVPSEEVVKKMKNYWRQLLNAKLITQRKFDNLTKAERGGLSELDKAGFIKRQLVETRQITKHVAQILDSRMNTKYDENDKLIREVKVITLKSKLVSDFRKDFQFYKVREINNYHHAHDAYLNAVVGTALIKKYPKLESEFVYGDYKVYDVRKMIAKSEQEIGKATAKYFFYSNIMNFFKTEITLANGEIRKRPLIETNGETGEIVWDKGRDFATVRKVLSMPQVNIVKKTEVQTGGFSKESILPKRNSDKLIARKKDWDPKKYGGFDSPTVAYSVLVVAKVEKGKSKKLKSVKELLGITIMERSSFEKNPIDFLEAKGYKEVKKDLIIKLPKYSLFELENGRKRMLASAGELQKGNELALPSKYVNFLYLASHYEKLKGSPEDNEQKQLFVEQHKHYLDEIIEQISEFSKRVILADANLDKVLSAYNKHRDKPIREQAENIIHLFTLTNLGAPAAFKYFDTTIDRKRYTSTKEVLDATLIHQSITGLYETRIDLSQLGGDGGEAAAKGGGPAPGGTAPLEEEYRLFLEAPIQNVTLLEQWKREIPKVWAEINPPGLASTQAPIHVQLLSTALPVRVRQYPITLEAKRSLRETIRKFRAAGILRPVHSPWNTPLLPVRKSGTSEYRMVQDLREVNKRVETIHPTVPNPYTLLSLLPPDRIWYSVLDLKDAFFCIPLAPESQLIFAFEWADAEEGESGQLTWTRLPQGFKNSPTLFNEALNRDLQGFRLDHPSVSLLQYVDDLLIAADTQAACLSATRDLLMTLAELGYRVSGKKAQLCQEEVTYLGFKIHKGSRSLSNSRTQAILQIPVPKTKRQVREFLGTIGYCRLWIPGFAELAQPLYAATRPGNDPLVWGEKEEEAFQSLKLALTQPPALALPSLDKPFQLFVEETSGAAKGVLTQALGPWKRPVAYLSKRLDPVAAGWPRCLRAIAAAALLTREASKLTFGQDIEITSSHNLESLLRSPPDKWLTNARITQYQVLLLDPPRVRFKQTAALNPATLLPETDDTLPIHHCLDTLDSLTSTRPDLTDQPLAQAEATLFTDGSSYIRDGKRYAGAAVVTLDSVIWAEPLPIGTSAQKAELIALTKALEWSKDKSVNIYTDSRYAFATLHVHGMIYRERGWLTAGGKAIKNAPEILALLTAVWLPKRVAVMHCKGHQKDDAPTSTGNRRADEVAREVAIRPLSTQATISAGKRTADGSEFEKRTADGSEFESPKKKAKVE

SEQ ID NO: 7488 - protein, 2098 aa, synthetic construct
MPAAKRVKLDGGDKKYSIGLDIGTNSVGWAVITDEYKVPSKKFKVLGNTDRHSIKKNLIGALLFDSGETAEATRLKRTARRRYTRRKNRICYLQEIFSNEMAKVDDSFFHRLEESFLVEEDKKHERHPIFGNIVDEVAYHEKYPTIYHLRKKLVDSTDKADLRLIYLALAHMIKFRGHFLIEGDLNPDNSDVDKLFIQLVQTYNQLFEENPINASGVDAKAILSARLSKSRRLENLIAQLPGEKKNGLFGNLIALSLGLTPNFKSNFDLAEDAKLQLSKDTYDDDLDNLLAQIGDQYADLFLAAKNLSDAILLSDILRVNTEITKAPLSASMIKRYDEHHQDLTLLKALVRQQLPEKYKEIFFDQSKNGYAGYIDGGASQEEFYKFIKPILEKMDGTEELLVKLNREDLLRKQRTFDNGSIPHQIHLGELHAILRRQEDFYPFLKDNREKIEKILTFRIPYYVGPLARGNSRFAWMTRKSEETITPWNFEEVVDKGASAQSFIERMTNFDKNLPNEKVLPKHSLLYEYFTVYNELTKVKYVTEGMRKPAFLSGEQKKAIVDLLFKTNRKVTVKQLKEDYFKKIECFDSVEISGVEDRFNASLGTYHDLLKIIKDKDFLDNEENEDILEDIVLTLTLFEDREMIEERLKTYAHLFDDKVMKQLKRRRYTGWGRLSRKLINGIRDKQSGKTILDFLKSDGFANRNFMQLIHDDSLTFKEDIQKAQVSGQGDSLHEHIANLAGSPAIKKGILQTVKVVDELVKVMGRHKPENIVIEMARENQTTQKGQKNSRERMKRIEEGIKELGSQILKEHPVENTQLQNEKLYLYYLQNGRDMYVDQELDINRLSDYDVDHIVPQSFLKDDSIDNKVLTRSDKARGKSDNVPSEEVVKKMKNYWRQLLNAKLITQRKFDNLTKAERGGLSELDKAGFIKRQLVETRQITKHVAQILDSRMNTKYDENDKLIREVKVITLKSKLVSDFRKDFQFYKVREINNYHHAHDAYLNAVVGTALIKKYPKLESEFVYGDYKVYDVRKMIAKSEQEIGKATAKYFFYSNIMNFFKTEITLANGEIRKRPLIETNGETGEIVWDKGRDFATVRKVLSMPQVNIVKKTEVQTGGFSKESILPKRNSDKLIARKKDWDPKKYGGFDSPTVAYSVLVVAKVEKGKSKKLKSVKELLGITIMERSSFEKNPIDFLEAKGYKEVKKDLIIKLPKYSLFELENGRKRMLASAGELQKGNELALPSKYVNFLYLASHYEKLKGSPEDNEQKQLFVEQHKHYLDEIIEQISEFSKRVILADANLDKVLSAYNKHRDKPIREQAENIIHLFTLTNLGAPAAFKYFDTTIDRKRYTSTKEVLDATLIHQSITGLYETRIDLSQLGGDGGEAAAKGGGPAPGGTAPLEEEYRLFLEAPIQNVTLLEQWKREIPKVWAEINPPGLASTQAPIHVQLLSTALPVRVRQYPITLEAKRSLRETIRKFRAAGILRPVHSPWNTPLLPVRKSGTSEYRMVQDLREVNKRVETIHPTVPNPYTLLSLLPPDRIWYSVLDLKDAFFCIPLAPESQLIFAFEWADAEEGESGQLTWTRLPQGFKNSPTLFNEALNRDLQGFRLDHPSVSLLQYVDDLLIAADTQAACLSATRDLLMTLAELGYRVSGKKAQLCQEEVTYLGFKIHKGSRSLSNSRTQAILQIPVPKTKRQVREFLGKIGYCRLFIPGFAELAQPLYAATRPGNDPLVWGEKEEEAFQSLKLALTQPPALALPSLDKPFQLFVEETSGAAKGVLTQALGPWKRPVAYLSKRLDPVAAGWPRCLRAIAAAALLTREASKLTFGQDIEITSSHNLESLLRSPPDKWLTNARITQYQVLLLDPPRVRFKQTAALNPATLLPETDDTLPIHHCLDTLDSLTSTRPDLTDQPLAQAEATLFTDGSSYIRDGKRYAGAAVVTLDSVIWAEPLPIGTSAQKAELIALTKALEWSKDKSVNIYTDSRYAFATLHVHGMIYRERGWLTAGGKAIKNAPEILALLTAVWLPKRVAVMHCKGHQKDDAPTSTGNRRADEVAREVAIRPLSTQATISAGKRTADGSEFEKRTADGSEFESPKKKAKVE

SEQ ID NO: 7489 - protein, 2102 aa, synthetic construct
MPAAKRVKLDGGDKKYSIGLDIGTNSVGWAVITDEYKVPSKKFKVLGNTDRHSIKKNLIGALLFDSGETAEATRLKRTARRRYTRRKNRICYLQEIFSNEMAKVDDSFFHRLEESFLVEEDKKHERHPIFGNIVDEVAYHEKYPTIYHLRKKLVDSTDKADLRLIYLALAHMIKFRGHFLIEGDLNPDNSDVDKLFIQLVQTYNQLFEENPINASGVDAKAILSARLSKSRRLENLIAQLPGEKKNGLFGNLIALSLGLTPNFKSNFDLAEDAKLQLSKDTYDDDLDNLLAQIGDQYADLFLAAKNLSDAILLSDILRVNTEITKAPLSASMIKRYDEHHQDLTLLKALVRQQLPEKYKEIFFDQSKNGYAGYIDGGASQEEFYKFIKPILEKMDGTEELLVKLNREDLLRKQRTFDNGSIPHQIHLGELHAILRRQEDFYPFLKDNREKIEKILTFRIPYYVGPLARGNSRFAWMTRKSEETITPWNFEEVVDKGASAQSFIERMTNFDKNLPNEKVLPKHSLLYEYFTVYNELTKVKYVTEGMRKPAFLSGEQKKAIVDLLFKTNRKVTVKQLKEDYFKKIECFDSVEISGVEDRFNASLGTYHDLLKIIKDKDFLDNEENEDILEDIVLTLTLFEDREMIEERLKTYAHLFDDKVMKQLKRRRYTGWGRLSRKLINGIRDKQSGKTILDFLKSDGFANRNFMQLIHDDSLTFKEDIQKAQVSGQGDSLHEHIANLAGSPAIKKGILQTVKVVDELVKVMGRHKPENIVIEMARENQTTQKGQKNSRERMKRIEEGIKELGSQILKEHPVENTQLQNEKLYLYYLQNGRDMYVDQELDINRLSDYDVDHIVPQSFLKDDSIDNKVLTRSDKARGKSDNVPSEEVVKKMKNYWRQLLNAKLITQRKFDNLTKAERGGLSELDKAGFIKRQLVETRQITKHVAQILDSRMNTKYDENDKLIREVKVITLKSKLVSDFRKDFQFYKVREINNYHHAHDAYLNAVVGTALIKKYPKLESEFVYGDYKVYDVRKMIAKSEQEIGKATAKYFFYSNIMNFFKTEITLANGEIRKRPLIETNGETGEIVWDKGRDFATVRKVLSMPQVNIVKKTEVQTGGFSKESILPKRNSDKLIARKKDWDPKKYGGFDSPTVAYSVLVVAKVEKGKSKKLKSVKELLGITIMERSSFEKNPIDFLEAKGYKEVKKDLIIKLPKYSLFELENGRKRMLASAGELQKGNELALPSKYVNFLYLASHYEKLKGSPEDNEQKQLFVEQHKHYLDEIIEQISEFSKRVILADANLDKVLSAYNKHRDKPIREQAENIIHLFTLTNLGAPAAFKYFDTTIDRKRYTSTKEVLDATLIHQSITGLYETRIDLSQLGGDGGEAAAKGGGPAPGGTVSLQDEHRLFDIPVTTSLPDVWLQDFPQAWAETGGLGRAKCQAPIIIDLKPTAVPVSIKQYPMSLEAHMGIRQHIIKFLELGVLRPCRSPWNTPLLPVKKPGTQDYRPVQDLREINKRTVDIHPTVPNPYNLLSTLKPDYSWYTVLDLKDAFFCLPLAPQSQELFAFEWKDPERGISGQLTWTRLPQGFKNSPTLFDEALHRDLTDFRTQHPEVTLLQYVDDLLLAAPTKKACTQGTRHLLQELGEKGYRASAKKAQICQTKVTYLGYILSEGKRWLTPGRIETVARIPPPRNPREVREFLGTAGFCRLWIPGFAELAAPLYALTKESTPFTWQTEHQLAFEALKKALLSAPALGLPDTSKPFTLFLDERQGIAKGVLTQKLGPWKRPVAYLSKKLDPVAAGWPPCLRIMAATAMLVKDSAKLTLGQPLTVITPHTLEAIVRQPPDRWITNARLTHYQALLLDTDRVQFGPPVTLNPATLLPVPENQPSPHDCRQVLAETHGTREDLKDQELPDADHTWYTDGSSYLDSGTRRAGAAVVDGHNTIWAQSLPPGTSAQKAELIALTKALELSKGKKANIYTDSRYAFATAHTHGSIYERRGLLTSEGKEIKNKAEIIALLKALFLPQEVAIIHCPGHQKGQDPVAVGNRQADRVARQAAMAEVLTLATEPDNTSHITAGKRTADGSEFEKRTADGSEFESPKKKAKVE

SEQ ID NO: 7490 - protein, 2102 aa, synthetic construct
MPAAKRVKLDGGDKKYSIGLDIGTNSVGWAVITDEYKVPSKKFKVLGNTDRHSIKKNLIGALLFDSGETAEATRLKRTARRRYTRRKNRICYLQEIFSNEMAKVDDSFFHRLEESFLVEEDKKHERHPIFGNIVDEVAYHEKYPTIYHLRKKLVDSTDKADLRLIYLALAHMIKFRGHFLIEGDLNPDNSDVDKLFIQLVQTYNQLFEENPINASGVDAKAILSARLSKSRRLENLIAQLPGEKKNGLFGNLIALSLGLTPNFKSNFDLAEDAKLQLSKDTYDDDLDNLLAQIGDQYADLFLAAKNLSDAILLSDILRVNTEITKAPLSASMIKRYDEHHQDLTLLKALVRQQLPEKYKEIFFDQSKNGYAGYIDGGASQEEFYKFIKPILEKMDGTEELLVKLNREDLLRKQRTFDNGSIPHQIHLGELHAILRRQEDFYPFLKDNREKIEKILTFRIPYYVGPLARGNSRFAWMTRKSEETITPWNFEEVVDKGASAQSFIERMTNFDKNLPNEKVLPKHSLLYEYFTVYNELTKVKYVTEGMRKPAFLSGEQKKAIVDLLFKTNRKVTVKQLKEDYFKKIECFDSVEISGVEDRFNASLGTYHDLLKIIKDKDFLDNEENEDILEDIVLTLTLFEDREMIEERLKTYAHLFDDKVMKQLKRRRYTGWGRLSRKLINGIRDKQSGKTILDFLKSDGFANRNFMQLIHDDSLTFKEDIQKAQVSGQGDSLHEHIANLAGSPAIKKGILQTVKVVDELVKVMGRHKPENIVIEMARENQTTQKGQKNSRERMKRIEEGIKELGSQILKEHPVENTQLQNEKLYLYYLQNGRDMYVDQELDINRLSDYDVDHIVPQSFLKDDSIDNKVLTRSDKARGKSDNVPSEEVVKKMKNYWRQLLNAKLITQRKFDNLTKAERGGLSELDKAGFIKRQLVETRQITKHVAQILDSRMNTKYDENDKLIREVKVITLKSKLVSDFRKDFQFYKVREINNYHHAHDAYLNAVVGTALIKKYPKLESEFVYGDYKVYDVRKMIAKSEQEIGKATAKYFFYSNIMNFFKTEITLANGEIRKRPLIETNGETGEIVWDKGRDFATVRKVLSMPQVNIVKKTEVQTGGFSKESILPKRNSDKLIARKKDWDPKKYGGFDSPTVAYSVLVVAKVEKGKSKKLKSVKELLGITIMERSSFEKNPIDFLEAKGYKEVKKDLIIKLPKYSLFELENGRKRMLASAGELQKGNELALPSKYVNFLYLASHYEKLKGSPEDNEQKQLFVEQHKHYLDEIIEQISEFSKRVILADANLDKVLSAYNKHRDKPIREQAENIIHLFTLTNLGAPAAFKYFDTTIDRKRYTSTKEVLDATLIHQSITGLYETRIDLSQLGGDGGEAAAKGGGPAPGGTVSLQDEHRLFDIPVTTSLPDVWLQDFPQAWAETGGLGRAKCQAPIIIDLKPTAVPVSIKQYPMSLEAHMGIRQHIIKFLELGVLRPCRSPWNTPLLPVKKPGTQDYRPVQDLREINKRTVDIHPTVPNPYNLLSTLKPDYSWYTVLDLKDAFFCLPLAPQSQELFAFEWKDPERGISGQLTWTRLPQGFKNSPTLFNEALHRDLTDFRTQHPEVTLLQYVDDLLLAAPTKKACTQGTRHLLQELGEKGYRASAKKAQICQTKVTYLGYILSEGKRWLTPGRIETVARIPPPRNPREVREFLGTAGFCRLWIPGFAELAAPLYALTKPSTPFTWQTEHQLAFEALKKALLSAPALGLPDTSKPFTLFLDERQGIAKGVLTQKLGPWKRPVAYLSKKLDPVAAGWPPCLRIMAATAMLVKDSAKLTLGQPLTVITPHTLEAIVRQPPDRWITNARLTHYQALLLDTDRVQFGPPVTLNPATLLPVPENQPSPHDCRQVLAETHGTREDLKDQELPDADHTWYTDGSSYLDSGTRRAGAAVVDGHNTIWAQSLPPGTSAQKAELIALTKALELSKGKKANIYTDSRYAFATAHTHGSIYERRGWLTSEGKEIKNKAEIIALLKALFLPQEVAIIHCPGHQKGQDPVAVGNRQADRVARQAAMAEVLTLATEPDNTSHITAGKRTADGSEFEKRTADGSEFESPKKKAKVE

SEQ ID NO: 7491 - protein, 2173 aa, synthetic construct
MPAAKRVKLDGGDKKYSIGLDIGTNSVGWAVITDEYKVPSKKFKVLGNTDRHSIKKNLIGALLFDSGETAEATRLKRTARRRYTRRKNRICYLQEIFSNEMAKVDDSFFHRLEESFLVEEDKKHERHPIFGNIVDEVAYHEKYPTIYHLRKKLVDSTDKADLRLIYLALAHMIKFRGHFLIEGDLNPDNSDVDKLFIQLVQTYNQLFEENPINASGVDAKAILSARLSKSRRLENLIAQLPGEKKNGLFGNLIALSLGLTPNFKSNFDLAEDAKLQLSKDTYDDDLDNLLAQIGDQYADLFLAAKNLSDAILLSDILRVNTEITKAPLSASMIKRYDEHHQDLTLLKALVRQQLPEKYKEIFFDQSKNGYAGYIDGGASQEEFYKFIKPILEKMDGTEELLVKLNREDLLRKQRTFDNGSIPHQIHLGELHAILRRQEDFYPFLKDNREKIEKILTFRIPYYVGPLARGNSRFAWMTRKSEETITPWNFEEVVDKGASAQSFIERMTNFDKNLPNEKVLPKHSLLYEYFTVYNELTKVKYVTEGMRKPAFLSGEQKKAIVDLLFKTNRKVTVKQLKEDYFKKIECFDSVEISGVEDRFNASLGTYHDLLKIIKDKDFLDNEENEDILEDIVLTLTLFEDREMIEERLKTYAHLFDDKVMKQLKRRRYTGWGRLSRKLINGIRDKQSGKTILDFLKSDGFANRNFMQLIHDDSLTFKEDIQKAQVSGQGDSLHEHIANLAGSPAIKKGILQTVKVVDELVKVMGRHKPENIVIEMARENQTTQKGQKNSRERMKRIEEGIKELGSQILKEHPVENTQLQNEKLYLYYLQNGRDMYVDQELDINRLSDYDVDHIVPQSFLKDDSIDNKVLTRSDKARGKSDNVPSEEVVKKMKNYWRQLLNAKLITQRKFDNLTKAERGGLSELDKAGFIKRQLVETRQITKHVAQILDSRMNTKYDENDKLIREVKVITLKSKLVSDFRKDFQFYKVREINNYHHAHDAYLNAVVGTALIKKYPKLESEFVYGDYKVYDVRKMIAKSEQEIGKATAKYFFYSNIMNFFKTEITLANGEIRKRPLIETNGETGEIVWDKGRDFATVRKVLSMPQVNIVKKTEVQTGGFSKESILPKRNSDKLIARKKDWDPKKYGGFDSPTVAYSVLVVAKVEKGKSKKLKSVKELLGITIMERSSFEKNPIDFLEAKGYKEVKKDLIIKLPKYSLFELENGRKRMLASAGELQKGNELALPSKYVNFLYLASHYEKLKGSPEDNEQKQLFVEQHKHYLDEIIEQISEFSKRVILADANLDKVLSAYNKHRDKPIREQAENIIHLFTLTNLGAPAAFKYFDTTIDRKRYTSTKEVLDATLIHQSITGLYETRIDLSQLGGDGGEAAAKGGGPAPGGMDLLKPLTVERKGVKIKGYWNSQADITCVPKDLLQGEEPVRQQNVTTIHGTQEGDVYYVNLKIDGRRINTEVIGTTLDYAIITPGDVPWILKKPLELTIKLDLEEQQGTLLNNSILSKKGKEELKQLFEKYSALWQSWENQVGHRRIRPHKIATGTVKPTPQKQYHINPKAKPDIQIVINDLLKQGVLIQKESTMNTPVYPVPKPNGRWRMVLDYRAVNKVTPLIAVQNQHSYGILGSLFKGRYKTTIDLSNGFWAHPIVPEDYWITAFTWQGKQYCWTVLPQGFLNSPGLFTGDVVDLLQGIPNVEVYVDDVYISHDSEKEHLEYLDILFNRLKEAGYIISLKKSNIANSIVDFLGFQITNEGRGLTDTFKEKLENITAPTTLKQLQSILGLLNFARNFIPDFTELIAPLYALIPKSTKNYVPWQIEHSTTLETLITKLNGAEYLQGRKGDKTLIMKVNASYTTGYIRYYNEGEKKPISYVSIVFSKTELKFTELEKLLTTVHKGLLKALDLSMGQNIHVYSPIVSMQNIQKTPQTAKKALASRWLSWLSYLEDPRIRFFYDPQMPALKDLPAVDTGKDNKKHPSNFQHIFYTDGSAITSPTKEGHLNAGMGIVYFINKDGNLQKQQEWSISLGNHTAQFAEIAAFEFALKKCLPLGGNILVVTDSNYVAKAYNEELDVWASNGFVNNRKKPLKHISKWKSVADLKRLRPDVVVTHEPGHQKLDSSPHAYGNNLADQLATQASFKVHAGKRTADGSEFEKRTADGSEFESPKKKAKVE

SEQ ID NO: 7492 - protein, 2094 aa, synthetic construct
MPAAKRVKLDGGDKKYSIGLDIGTNSVGWAVITDEYKVPSKKFKVLGNTDRHSIKKNLIGALLFDSGETAEATRLKRTARRRYTRRKNRICYLQEIFSNEMAKVDDSFFHRLEESFLVEEDKKHERHPIFGNIVDEVAYHEKYPTIYHLRKKLVDSTDKADLRLIYLALAHMIKFRGHFLIEGDLNPDNSDVDKLFIQLVQTYNQLFEENPINASGVDAKAILSARLSKSRRLENLIAQLPGEKKNGLFGNLIALSLGLTPNFKSNFDLAEDAKLQLSKDTYDDDLDNLLAQIGDQYADLFLAAKNLSDAILLSDILRVNTEITKAPLSASMIKRYDEHHQDLTLLKALVRQQLPEKYKEIFFDQSKNGYAGYIDGGASQEEFYKFIKPILEKMDGTEELLVKLNREDLLRKQRTFDNGSIPHQIHLGELHAILRRQEDFYPFLKDNREKIEKILTFRIPYYVGPLARGNSRFAWMTRKSEETITPWNFEEVVDKGASAQSFIERMTNFDKNLPNEKVLPKHSLLYEYFTVYNELTKVKYVTEGMRKPAFLSGEQKKAIVDLLFKTNRKVTVKQLKEDYFKKIECFDSVEISGVEDRFNASLGTYHDLLKIIKDKDFLDNEENEDILEDIVLTLTLFEDREMIEERLKTYAHLFDDKVMKQLKRRRYTGWGRLSRKLINGIRDKQSGKTILDFLKSDGFANRNFMQLIHDDSLTFKEDIQKAQVSGQGDSLHEHIANLAGSPAIKKGILQTVKVVDELVKVMGRHKPENIVIEMARENQTTQKGQKNSRERMKRIEEGIKELGSQILKEHPVENTQLQNEKLYLYYLQNGRDMYVDQELDINRLSDYDVDHIVPQSFLKDDSIDNKVLTRSDKARGKSDNVPSEEVVKKMKNYWRQLLNAKLITQRKFDNLTKAERGGLSELDKAGFIKRQLVETRQITKHVAQILDSRMNTKYDENDKLIREVKVITLKSKLVSDFRKDFQFYKVREINNYHHAHDAYLNAVVGTALIKKYPKLESEFVYGDYKVYDVRKMIAKSEQEIGKATAKYFFYSNIMNFFKTEITLANGEIRKRPLIETNGETGEIVWDKGRDFATVRKVLSMPQVNIVKKTEVQTGGFSKESILPKRNSDKLIARKKDWDPKKYGGFDSPTVAYSVLVVAKVEKGKSKKLKSVKELLGITIMERSSFEKNPIDFLEAKGYKEVKKDLIIKLPKYSLFELENGRKRMLASAGELQKGNELALPSKYVNFLYLASHYEKLKGSPEDNEQKQLFVEQHKHYLDEIIEQISEFSKRVILADANLDKVLSAYNKHRDKPIREQAENIIHLFTLTNLGAPAAFKYFDTTIDRKRYTSTKEVLDATLIHQSITGLYETRIDLSQLGGDGGEAAAKGGGPAPGGVLNLEEEYRLHEKPVPSSIDPSWLQLFPTVWAERAGMGLANQVPPVVVELRSGASPVAVRQYPMSKEAREGIRPHIQKFLDLGVLVPCRSPWNTPLLPVKKPGTNDYRPVQDLREINKRVQDIHPTVPNPYNLLSSLPPSYTWYSVLDLKDAFFCLRLHPNSQPLFAFEWKDPEKGNTGQLTWTRLPQGFKNSPTLFDEALHRDLAPFRALNPQVVLLQYVDDLLVAAPTYEDCKKGTQKLLQELSKLGYRVSAKKAQLCQREVTYLGYLLKEGKRWLTPARKATVMKIPVPTTPRQVREFLGTAGFCRLWIPGFASLAAPLYPLTKESIPFIWTEEHQQAFDHIKKALLSAPALALPDLTKPFTLYIDERAGVARGVLTQTLGPWRRPVAYLSKKLDPVASGWPTCLKAVAAVALLLKDADKLTLGQNVTVIASHSLESIVRQPPDRWMTNARMTHYQSLLLNERVSFAPPAVLNPATLLPVESEATPVHRCSEILAEETGTRRDLEDQPLPGVPTWYTDGSSFITEGKRRAGAPIVDGKRTVWASSLPEGTSAQKAELVALTQALRLAEGKNINIYTDSRYAFATAHIHGAIYKQRGLLTSAGKDIKNKEEILALLEAIHLPRRVAIIHCPGHQRGSNPVATGNRRADEAAKQAALSTRVLAGTTKPAGKRTADGSEFEKRTADGSEFESPKKKAKVE

SEQ ID NO: 7493 - protein, 2218 aa, synthetic construct
MPAAKRVKLDGGDKKYSIGLDIGTNSVGWAVITDEYKVPSKKFKVLGNTDRHSIKKNLIGALLFDSGETAEATRLKRTARRRYTRRKNRICYLQEIFSNEMAKVDDSFFHRLEESFLVEEDKKHERHPIFGNIVDEVAYHEKYPTIYHLRKKLVDSTDKADLRLIYLALAHMIKFRGHFLIEGDLNPDNSDVDKLFIQLVQTYNQLFEENPINASGVDAKAILSARLSKSRRLENLIAQLPGEKKNGLFGNLIALSLGLTPNFKSNFDLAEDAKLQLSKDTYDDDLDNLLAQIGDQYADLFLAAKNLSDAILLSDILRVNTEITKAPLSASMIKRYDEHHQDLTLLKALVRQQLPEKYKEIFFDQSKNGYAGYIDGGASQEEFYKFIKPILEKMDGTEELLVKLNREDLLRKQRTFDNGSIPHQIHLGELHAILRRQEDFYPFLKDNREKIEKILTFRIPYYVGPLARGNSRFAWMTRKSEETITPWNFEEVVDKGASAQSFIERMTNFDKNLPNEKVLPKHSLLYEYFTVYNELTKVKYVTEGMRKPAFLSGEQKKAIVDLLFKTNRKVTVKQLKEDYFKKIECFDSVEISGVEDRFNASLGTYHDLLKIIKDKDFLDNEENEDILEDIVLTLTLFEDREMIEERLKTYAHLFDDKVMKQLKRRRYTGWGRLSRKLINGIRDKQSGKTILDFLKSDGFANRNFMQLIHDDSLTFKEDIQKAQVSGQGDSLHEHIANLAGSPAIKKGILQTVKVVDELVKVMGRHKPENIVIEMARENQTTQKGQKNSRERMKRIEEGIKELGSQILKEHPVENTQLQNEKLYLYYLQNGRDMYVDQELDINRLSDYDVDHIVPQSFLKDDSIDNKVLTRSDKARGKSDNVPSEEVVKKMKNYWRQLLNAKLITQRKFDNLTKAERGGLSELDKAGFIKRQLVETRQITKHVAQILDSRMNTKYDENDKLIREVKVITLKSKLVSDFRKDFQFYKVREINNYHHAHDAYLNAVVGTALIKKYPKLESEFVYGDYKVYDVRKMIAKSEQEIGKATAKYFFYSNIMNFFKTEITLANGEIRKRPLIETNGETGEIVWDKGRDFATVRKVLSMPQVNIVKKTEVQTGGFSKESILPKRNSDKLIARKKDWDPKKYGGFDSPTVAYSVLVVAKVEKGKSKKLKSVKELLGITIMERSSFEKNPIDFLEAKGYKEVKKDLIIKLPKYSLFELENGRKRMLASAGELQKGNELALPSKYVNFLYLASHYEKLKGSPEDNEQKQLFVEQHKHYLDEIIEQISEFSKRVILADANLDKVLSAYNKHRDKPIREQAENIIHLFTLTNLGAPAAFKYFDTTIDRKRYTSTKEVLDATLIHQSITGLYETRIDLSQLGGDGGEAAAKGGGPAPGGTLGDQGSRGSDPLPEPRVTLTVEGIPTEFLVNTGAEHSVLTKPMGKMGSKRTVVAGATGSKVYPWTTKRLLKIGQKQVTHSFLVIPECPAPLLGRDLLTKLKAQIQFSTEGPQVTWEDRPAMCLVLNLEEEYRLHEKPVPPSIDPSWLQLFPMVWAEKAGMGLANQVPPVVVELKSDASPVAVRQYPMSKEAREGIRPHIQRFLDLGILVPCQSPWNTPLLPVKKPGTNDYRPVQDLREVNKRVQDIHPTVPNPYNLLSSLPPSHTWYSVLDLKDAFFCLKLHPNSQPLFAFEWRDPEKGNTGQLTWTRLPQGFKNSPTLFDEALHRDLASFRALNPQVVMLQYVDDLLVAAPTYRDCKEGTRRLLQELSKLGYRVSAKKAQLCREEVTYLGYLLKGGKRWLTPARKATVMKIPTPTTPRQVREFLGTAGFCRLWIPGFASLAAPLYPLTREKVPFTWTEAHQEAFGRIKEALLSAPALALPDLTKPFALYVDEKEGVARGVLTQTLGPWRRPVAYLSKKLDPVASGWPTCLKAIAAVALLLKDADKLTLGQNVLVIAPHNLESIVRQPPDRWMTNARMTHYQSLLLNERVSFAPPAILNPATLLPVESDDTPIHICSEILAEETGTRPDLRDQPLPGVPAWYTDGSSFIMDGRRQAGAAIVDNKRTVWASNLPEGTSAQKAELIALTQALRLAEGKSINIYTDSRYAFATAHVHGAIYKQRGLLTSAGKDIKNKEEILALLEAIHLPKRVAIIHCPGHQRGTDPVATGNRKADEAAKQAAQSTRILTETTKNAGKRTADGSEFEKRTADGSEFESPKKKAKVE

SEQ ID NO: 7494 - protein, 2127 aa, synthetic construct
MPAAKRVKLDGGDKKYSIGLDIGTNSVGWAVITDEYKVPSKKFKVLGNTDRHSIKKNLIGALLFDSGETAEATRLKRTARRRYTRRKNRICYLQEIFSNEMAKVDDSFFHRLEESFLVEEDKKHERHPIFGNIVDEVAYHEKYPTIYHLRKKLVDSTDKADLRLIYLALAHMIKFRGHFLIEGDLNPDNSDVDKLFIQLVQTYNQLFEENPINASGVDAKAILSARLSKSRRLENLIAQLPGEKKNGLFGNLIALSLGLTPNFKSNFDLAEDAKLQLSKDTYDDDLDNLLAQIGDQYADLFLAAKNLSDAILLSDILRVNTEITKAPLSASMIKRYDEHHQDLTLLKALVRQQLPEKYKEIFFDQSKNGYAGYIDGGASQEEFYKFIKPILEKMDGTEELLVKLNREDLLRKQRTFDNGSIPHQIHLGELHAILRRQEDFYPFLKDNREKIEKILTFRIPYYVGPLARGNSRFAWMTRKSEETITPWNFEEVVDKGASAQSFIERMTNFDKNLPNEKVLPKHSLLYEYFTVYNELTKVKYVTEGMRKPAFLSGEQKKAIVDLLFKTNRKVTVKQLKEDYFKKIECFDSVEISGVEDRFNASLGTYHDLLKIIKDKDFLDNEENEDILEDIVLTLTLFEDREMIEERLKTYAHLFDDKVMKQLKRRRYTGWGRLSRKLINGIRDKQSGKTILDFLKSDGFANRNFMQLIHDDSLTFKEDIQKAQVSGQGDSLHEHIANLAGSPAIKKGILQTVKVVDELVKVMGRHKPENIVIEMARENQTTQKGQKNSRERMKRIEEGIKELGSQILKEHPVENTQLQNEKLYLYYLQNGRDMYVDQELDINRLSDYDVDHIVPQSFLKDDSIDNKVLTRSDKARGKSDNVPSEEVVKKMKNYWRQLLNAKLITQRKFDNLTKAERGGLSELDKAGFIKRQLVETRQITKHVAQILDSRMNTKYDENDKLIREVKVITLKSKLVSDFRKDFQFYKVREINNYHHAHDAYLNAVVGTALIKKYPKLESEFVYGDYKVYDVRKMIAKSEQEIGKATAKYFFYSNIMNFFKTEITLANGEIRKRPLIETNGETGEIVWDKGRDFATVRKVLSMPQVNIVKKTEVQTGGFSKESILPKRNSDKLIARKKDWDPKKYGGFDSPTVAYSVLVVAKVEKGKSKKLKSVKELLGITIMERSSFEKNPIDFLEAKGYKEVKKDLIIKLPKYSLFELENGRKRMLASAGELQKGNELALPSKYVNFLYLASHYEKLKGSPEDNEQKQLFVEQHKHYLDEIIEQISEFSKRVILADANLDKVLSAYNKHRDKPIREQAENIIHLFTLTNLGAPAAFKYFDTTIDRKRYTSTKEVLDATLIHQSITGLYETRIDLSQLGGDGGEAAAKGGGPAPGGLLGRDLLTKLKAQIQFSTEGPQVTWEDRPAMCLVLNLEEEYRLHEKPVPPSIDPSWLQLFPMVWAEKAGMGLANQVPPVVVELKSDASPVAVRQYPMSKEAREGIRPHIQRFLDLGILVPCQSPWNTPLLPVKKPGTNDYRPVQDLREVNKRVQDIHPTVPNPYNLLSSLPPSHTWYSVLDLKDAFFCLKLHPNSQPLFAFEWRDPEKGNTGQLTWTRLPQGFKNSPTLFNEALHRDLASFRALNPQVVMLQYVDDLLVAAPTYRDCKEGTRRLLQELSKLGYRVSAKKAQLCREEVTYLGYLLKGGKRWLTPARKATVMKIPTPTTPRQVREFLGKAGFCRLFIPGFASLAAPLYPLTRPKVPFTWTEAHQEAFGRIKEALLSAPALALPDLTKPFALYVDEKEGVARGVLTQTLGPWRRPVAYLSKKLDPVASGWPTCLKAIAAVALLLKDADKLTLGQNVLVIAPHNLESIVRQPPDRWMTNARMTHYQSLLLNERVSFAPPAILNPATLLPVESDDTPIHICSEILAEETGTRPDLRDQPLPGVPAWYTDGSSFIMDGRRQAGAAIVDNKRTVWASNLPEGTSAQKAELIALTQALRLAEGKSINIYTDSRYAFATAHVHGAIYKQRGWLTSAGKDIKNKEEILALLEAIHLPKRVAIIHCPGHQRGTDPVATGNRKADEAAKQAAQSTRILTETTKNAGKRTADGSEFEKRTADGSEFESPKKKAKVE

SEQ ID NO: 7495 - protein, 2096 aa, synthetic construct
MPAAKRVKLDGGDKKYSIGLDIGTNSVGWAVITDEYKVPSKKFKVLGNTDRHSIKKNLIGALLFDSGETAEATRLKRTARRRYTRRKNRICYLQEIFSNEMAKVDDSFFHRLEESFLVEEDKKHERHPIFGNIVDEVAYHEKYPTIYHLRKKLVDSTDKADLRLIYLALAHMIKFRGHFLIEGDLNPDNSDVDKLFIQLVQTYNQLFEENPINASGVDAKAILSARLSKSRRLENLIAQLPGEKKNGLFGNLIALSLGLTPNFKSNFDLAEDAKLQLSKDTYDDDLDNLLAQIGDQYADLFLAAKNLSDAILLSDILRVNTEITKAPLSASMIKRYDEHHQDLTLLKALVRQQLPEKYKEIFFDQSKNGYAGYIDGGASQEEFYKFIKPILEKMDGTEELLVKLNREDLLRKQRTFDNGSIPHQIHLGELHAILRRQEDFYPFLKDNREKIEKILTFRIPYYVGPLARGNSRFAWMTRKSEETITPWNFEEVVDKGASAQSFIERMTNFDKNLPNEKVLPKHSLLYEYFTVYNELTKVKYVTEGMRKPAFLSGEQKKAIVDLLFKTNRKVTVKQLKEDYFKKIECFDSVEISGVEDRFNASLGTYHDLLKIIKDKDFLDNEENEDILEDIVLTLTLFEDREMIEERLKTYAHLFDDKVMKQLKRRRYTGWGRLSRKLINGIRDKQSGKTILDFLKSDGFANRNFMQLIHDDSLTFKEDIQKAQVSGQGDSLHEHIANLAGSPAIKKGILQTVKVVDELVKVMGRHKPENIVIEMARENQTTQKGQKNSRERMKRIEEGIKELGSQILKEHPVENTQLQNEKLYLYYLQNGRDMYVDQELDINRLSDYDVDHIVPQSFLKDDSIDNKVLTRSDKARGKSDNVPSEEVVKKMKNYWRQLLNAKLITQRKFDNLTKAERGGLSELDKAGFIKRQLVETRQITKHVAQILDSRMNTKYDENDKLIREVKVITLKSKLVSDFRKDFQFYKVREINNYHHAHDAYLNAVVGTALIKKYPKLESEFVYGDYKVYDVRKMIAKSEQEIGKATAKYFFYSNIMNFFKTEITLANGEIRKRPLIETNGETGEIVWDKGRDFATVRKVLSMPQVNIVKKTEVQTGGFSKESILPKRNSDKLIARKKDWDPKKYGGFDSPTVAYSVLVVAKVEKGKSKKLKSVKELLGITIMERSSFEKNPIDFLEAKGYKEVKKDLIIKLPKYSLFELENGRKRMLASAGELQKGNELALPSKYVNFLYLASHYEKLKGSPEDNEQKQLFVEQHKHYLDEIIEQISEFSKRVILADANLDKVLSAYNKHRDKPIREQAENIIHLFTLTNLGAPAAFKYFDTTIDRKRYTSTKEVLDATLIHQSITGLYETRIDLSQLGGDGGEAAAKGGGPAPGGTLGIEDEYRLHETSTEPDVSLGSTWLSDFPQAWAETGGMGLAVRQAPLIIPLKATSTPVSIQQYPMSHEARLGIKPHIQRLLDQGILVPCQSPWNTPLLPVKKPGTNDYRPVQDLREVNKRVEDIHPTVPNPYNLLSGLPPSHQWYTVLDLKDAFFCLRLHPTSQPLFAFEWRDPGMGISGQLTWTRLPQGFKNSPTLFNEALHRDLADFRIQHPDLILLQYVDDILLAATSELDCQQGTRALLQTLGDLGYRASAKKAQICQKQVKYLGYLLREGQRWLTEARKETVMGQPVPKTPRQLREFLGTAGFCRLWIPGFAEMAAPLYPLTKPGTLFSWGPDQQKAYQEIKQALLTAPALGLPDLTKPFELFVDEKQGYAKGVLTQKLGPWRRPVAYLSKKLDPVAAGWPPCLRMVAAIAVLTKDAGKLTMGQPLVILAPHAVEALVKQPPDRWLSNARMTHYQAMLLDTDRVQFGPVVALNPATLLPLPEEGAPHDCLEILAETHGTRPDLTDQPIPDADHTWYTDGSSFLQEGQRKAGAAVTTETEVIWAGALPAGTSAQRAELIALTQALKMAEGKRLNVYTDSRYAFATAHIHGEIYRRRGWLTSEGREIKNKSEILALLKALFLPKRLSIIHCLGHQKGDSAEARGNRLADQAAREAAIKTPPDTSTLLAGKRTADGSEFEKRTADGSEFESPKKKAKVE

SEQ ID NO: 7496 - protein, 2096 aa, synthetic construct; identical to SEQ ID NO: 4535

SEQ ID NO: 7497 - protein, 2096 aa, synthetic construct; identical to SEQ ID NO: 4535

SEQ ID NO: 7498 - protein, 2176 aa, synthetic construct
MPAAKRVKLDGGDKKYSIGLDIGTNSVGWAVITDEYKVPSKKFKVLGNTDRHSIKKNLIGALLFDSGETAEATRLKRTARRRYTRRKNRICYLQEIFSNEMAKVDDSFFHRLEESFLVEEDKKHERHPIFGNIVDEVAYHEKYPTIYHLRKKLVDSTDKADLRLIYLALAHMIKFRGHFLIEGDLNPDNSDVDKLFIQLVQTYNQLFEENPINASGVDAKAILSARLSKSRRLENLIAQLPGEKKNGLFGNLIALSLGLTPNFKSNFDLAEDAKLQLSKDTYDDDLDNLLAQIGDQYADLFLAAKNLSDAILLSDILRVNTEITKAPLSASMIKRYDEHHQDLTLLKALVRQQLPEKYKEIFFDQSKNGYAGYIDGGASQEEFYKFIKPILEKMDGTEELLVKLNREDLLRKQRTFDNGSIPHQIHLGELHAILRRQEDFYPFLKDNREKIEKILTFRIPYYVGPLARGNSRFAWMTRKSEETITPWNFEEVVDKGASAQSFIERMTNFDKNLPNEKVLPKHSLLYEYFTVYNELTKVKYVTEGMRKPAFLSGEQKKAIVDLLFKTNRKVTVKQLKEDYFKKIECFDSVEISGVEDRFNASLGTYHDLLKIIKDKDFLDNEENEDILEDIVLTLTLFEDREMIEERLKTYAHLFDDKVMKQLKRRRYTGWGRLSRKLINGIRDKQSGKTILDFLKSDGFANRNFMQLIHDDSLTFKEDIQKAQVSGQGDSLHEHIANLAGSPAIKKGILQTVKVVDELVKVMGRHKPENIVIEMARENQTTQKGQKNSRERMKRIEEGIKELGSQILKEHPVENTQLQNEKLYLYYLQNGRDMYVDQELDINRLSDYDVDHIVPQSFLKDDSIDNKVLTRSDKARGKSDNVPSEEVVKKMKNYWRQLLNAKLITQRKFDNLTKAERGGLSELDKAGFIKRQLVETRQITKHVAQILDSRMNTKYDENDKLIREVKVITLKSKLVSDFRKDFQFYKVREINNYHHAHDAYLNAVVGTALIKKYPKLESEFVYGDYKVYDVRKMIAKSEQEIGKATAKYFFYSNIMNFFKTEITLANGEIRKRPLIETNGETGEIVWDKGRDFATVRKVLSMPQVNIVKKTEVQTGGFSKESILPKRNSDKLIARKKDWDPKKYGGFDSPTVAYSVLVVAKVEKGKSKKLKSVKELLGITIMERSSFEKNPIDFLEAKGYKEVKKDLIIKLPKYSLFELENGRKRMLASAGELQKGNELALPSKYVNFLYLASHYEKLKGSPEDNEQKQLFVEQHKHYLDEIIEQISEFSKRVILADANLDKVLSAYNKHRDKPIREQAENIIHLFTLTNLGAPAAFKYFDTTIDRKRYTSTKEVLDATLIHQSITGLYETRIDLSQLGGDGGEAAAKGGGPAPGGMNPLQLLQPLPAEVKGTKLLAHWNSGATITCIPESFLEDEQPIKQTLIKTIHGEKQQNVYYLTFKVKGRKVEAEVIASPYEYILLSPTDVPWLTQQPLQLTILVPLQEYQDRILNKTALPEEQKQQLKALFTKYDNLWQHWENQVGHRKIRPHNIATGDYPPRPQKQYPINPKAKPSIQIVIDDLLKQGVLTPQNSTMNTPVYPVPKPDGRWRMVLDYREVNKTIPLTAAQNQHSAGILATIVRQKYKTTLDLANGFWAHPITPDSYWLTAFTWQGKQYCWTRLPQGFLNSPALFTADAVDLLKEVPNVQVYVDDIYLSHDNPHEHIQQLEKVFQILLQAGYVVSLKKSEIGQRTVEFLGFNITKEGRGLTDTFKTKLLNVTPPKDLKQLQSILGLLNFARNFIPNFAELVQTLYNLIASSKGKYIEWTEDNTKQLNKVIEALNTASNLEERLPDQRLVIKVNTSPSAGYVRYYNESGKKPIMYLNYVFSKAELKFSMLEKLLTTMHKALIKAMDLAMGQEILVYSPIVSMTKIQKTPLPERKALPIRWITWMTYLEDPRIQFHYDKTLPELKHIPDVYTSSIPPLKHPSQYEGVFCTDGSAIKSPDPTKSNNAGMGIVHAIYNPEYKILNQWSIPLGHHTAQMAEIAAVEFACKKALKVPGPVLVITDSFYVAESANKELPYWKSNGFVNNKKEPLKHISKWKSIAECLSIKPDITIQHEKGHQPINTSIHTEGNALADKLATQGSYVVNAGKRTADGSEFEKRTADGSEFESPKKKAKVE

SEQ ID NO: 7499 - protein, 2094 aa, synthetic construct
MPAAKRVKLDGGDKKYSIGLDIGTNSVGWAVITDEYKVPSKKFKVLGNTDRHSIKKNLIGALLFDSGETAEATRLKRTARRRYTRRKNRICYLQEIFSNEMAKVDDSFFHRLEESFLVEEDKKHERHPIFGNIVDEVAYHEKYPTIYHLRKKLVDSTDKADLRLIYLALAHMIKFRGHFLIEGDLNPDNSDVDKLFIQLVQTYNQLFEENPINASGVDAKAILSARLSKSRRLENLIAQLPGEKKNGLFGNLIALSLGLTPNFKSNFDLAEDAKLQLSKDTYDDDLDNLLAQIGDQYADLFLAAKNLSDAILLSDILRVNTEITKAPLSASMIKRYDEHHQDLTLLKALVRQQLPEKYKEIFFDQSKNGYAGYIDGGASQEEFYKFIKPILEKMDGTEELLVKLNREDLLRKQRTFDNGSIPHQIHLGELHAILRRQEDFYPFLKDNREKIEKILTFRIPYYVGPLARGNSRFAWMTRKSEETITPWNFEEVVDKGASAQSFIERMTNFDKNLPNEKVLPKHSLLYEYFTVYNELTKVKYVTEGMRKPAFLSGEQKKAIVDLLFKTNRKVTVKQLKEDYFKKIECFDSVEISGVEDRFNASLGTYHDLLKIIKDKDFLDNEENEDILEDIVLTLTLFEDREMIEERLKTYAHLFDDKVMKQLKRRRYTGWGRLSRKLINGIRDKQSGKTILDFLKSDGFANRNFMQLIHDDSLTFKEDIQKAQVSGQGDSLHEHIANLAGSPAIKKGILQTVKVVDELVKVMGRHKPENIVIEMARENQTTQKGQKNSRERMKRIEEGIKELGSQILKEHPVENTQLQNEKLYLYYLQNGRDMYVDQELDINRLSDYDVDHIVPQSFLKDDSIDNKVLTRSDKARGKSDNVPSEEVVKKMKNYWRQLLNAKLITQRKFDNLTKAERGGLSELDKAGFIKRQLVETRQITKHVAQILDSRMNTKYDENDKLIREVKVITLKSKLVSDFRKDFQFYKVREINNYHHAHDAYLNAVVGTALIKKYPKLESEFVYGDYKVYDVRKMIAKSEQEIGKATAKYFFYSNIMNFFKTEITLANGEIRKRPLIETNGETGEIVWDKGRDFATVRKVLSMPQVNIVKKTEVQTGGFSKESILPKRNSDKLIARKKDWDPKKYGGFDSPTVAYSVLVVAKVEKGKSKKLKSVKELLGITIMERSSFEKNPIDFLEAKGYKEVKKDLIIKLPKYSLFELENGRKRMLASAGELQKGNELALPSKYVNFLYLASHYEKLKGSPEDNEQKQLFVEQHKHYLDEIIEQISEFSKRVILADANLDKVLSAYNKHRDKPIREQAENIIHLFTLTNLGAPAAFKYFDTTIDRKRYTSTKEVLDATLIHQSITGLYETRIDLSQLGGDGGEAAAKGGGPAPGGVLNLEEEYRLHEKPVPSSIDPSWLQLFPTVWAERAGMGLANQVPPVVVELRSGASPVAVRQYPMSKEAREGIRPHIQRFLDLGVLVPCQSPWNTPLLPVKKPGTNDYRPVQDLREINKRVQDIHPTVPNPYNLLSSLPPSHTWYSVLDLKDAFFCLKLHPNSQPLFAFEWRDPEKGNTGQLTWTRLPQGFKNSPTLFNEALHRDLAPFRALNPQVVLLQYVDDLLVAAPTYRDCKEGTQKLLQELSKLGYRVSAKKAQLCQKEVTYLGYLLKEGKRWLTPARKATVMKIPPPTTPRQVREFLGKAGFCRLFIPGFASLAAPLYPLTKPSIPFIWTEEHQKAFDRIKEALLSAPALALPDLTKPFTLYVDERAGVARGVLTQTLGPWRRPVAYLSKKLDPVASGWPTCLKAVAAVALLLKDADKLTLGQNVTVIASHSLESIVRQPPDRWMTNARMTHYQSLLLNERVSFAPPAVLNPATLLPVESEATPVHRCSEILAEETGTRRDLKDQPLPGVPAWYTDGSSFIAEGKRRAGAAIVDGKRTVWASSLPEGTSAQKAELVALTQALRLAEGKDINIYTDSRYAFATAHIHGAIYKQRGWLTSAGKDIKNKEEILALLEAIHLPKRVAIIHCPGHQKGNDPVATGNRRADEAAKQAALSTRVLAETTKPAGKRTADGSEFEKRTADGSEFESPKKKAKVE

SEQ ID NO: 7500 - protein, 2098 aa, synthetic construct
MPAAKRVKLDGGDKKYSIGLDIGTNSVGWAVITDEYKVPSKKFKVLGNTDRHSIKKNLIGALLFDSGETAEATRLKRTARRRYTRRKNRICYLQEIFSNEMAKVDDSFFHRLEESFLVEEDKKHERHPIFGNIVDEVAYHEKYPTIYHLRKKLVDSTDKADLRLIYLALAHMIKFRGHFLIEGDLNPDNSDVDKLFIQLVQTYNQLFEENPINASGVDAKAILSARLSKSRRLENLIAQLPGEKKNGLFGNLIALSLGLTPNFKSNFDLAEDAKLQLSKDTYDDDLDNLLAQIGDQYADLFLAAKNLSDAILLSDILRVNTEITKAPLSASMIKRYDEHHQDLTLLKALVRQQLPEKYKEIFFDQSKNGYAGYIDGGASQEEFYKFIKPILEKMDGTEELLVKLNREDLLRKQRTFDNGSIPHQIHLGELHAILRRQEDFYPFLKDNREKIEKILTFRIPYYVGPLARGNSRFAWMTRKSEETITPWNFEEVVDKGASAQSFIERMTNFDKNLPNEKVLPKHSLLYEYFTVYNELTKVKYVTEGMRKPAFLSGEQKKAIVDLLFKTNRKVTVKQLKEDYFKKIECFDSVEISGVEDRFNASLGTYHDLLKIIKDKDFLDNEENEDILEDIVLTLTLFEDREMIEERLKTYAHLFDDKVMKQLKRRRYTGWGRLSRKLINGIRDKQSGKTILDFLKSDGFANRNFMQLIHDDSLTFKEDIQKAQVSGQGDSLHEHIANLAGSPAIKKGILQTVKVVDELVKVMGRHKPENIVIEMARENQTTQKGQKNSRERMKRIEEGIKELGSQILKEHPVENTQLQNEKLYLYYLQNGRDMYVDQELDINRLSDYDVDHIVPQSFLKDDSIDNKVLTRSDKARGKSDNVPSEEVVKKMKNYWRQLLNAKLITQRKFDNLTKAERGGLSELDKAGFIKRQLVETRQITKHVAQILDSRMNTKYDENDKLIREVKVITLKSKLVSDFRKDFQFYKVREINNYHHAHDAYLNAVVGTALIKKYPKLESEFVYGDYKVYDVRKMIAKSEQEIGKATAKYFFYSNIMNFFKTEITLANGEIRKRPLIETNGETGEIVWDKGRDFATVRKVLSMPQVNIVKKTEVQTGGFSKESILPKRNSDKLIARKKDWDPKKYGGFDSPTVAYSVLVVAKVEKGKSKKLKSVKELLGITIMERSSFEKNPIDFLEAKGYKEVKKDLIIKLPKYSLFELENGRKRMLASAGELQKGNELALPSKYVNFLYLASHYEKLKGSPEDNEQKQLFVEQHKHYLDEIIEQISEFSKRVILADANLDKVLSAYNKHRDKPIREQAENIIHLFTLTNLGAPAAFKYFDTTIDRKRYTSTKEVLDATLIHQSITGLYETRIDLSQLGGDGGEAAAKPAPGGGGGTAPLEEEYRLFLEAPIQNVTLLEQWKREIPKVWAEINPPGLASTQAPIHVQLLSTALPVRVRQYPITLEAKRSLRETIRKFRAAGILRPVHSPWNTPLLPVRKSGTSEYRMVQDLREVNKRVETIHPTVPNPYTLLSLLPPDRIWYSVLDLKDAFFCIPLAPESQLIFAFEWADAEEGESGQLTWTRLPQGFKNSPTLFNEALNRDLQGFRLDHPSVSLLQYVDDLLIAADTQAACLSATRDLLMTLAELGYRVSGKKAQLCQEEVTYLGFKIHKGSRSLSNSRTQAILQIPVPKTKRQVREFLGKIGYCRLFIPGFAELAQPLYAATRPGNDPLVWGEKEEEAFQSLKLALTQPPALALPSLDKPFQLFVEETSGAAKGVLTQALGPWKRPVAYLSKRLDPVAAGWPRCLRAIAAAALLTREASKLTFGQDIEITSSHNLESLLRSPPDKWLTNARITQYQVLLLDPPRVRFKQTAALNPATLLPETDDTLPIHHCLDTLDSLTSTRPDLTDQPLAQAEATLFTDGSSYIRDGKRYAGAAVVTLDSVIWAEPLPIGTSAQKAELIALTKALEWSKDKSVNIYTDSRYAFATLHVHGMIYRERGWLTAGGKAIKNAPEILALLTAVWLPKRVAVMHCKGHQKDDAPTSTGNRRADEVAREVAIRPLSTQATISAGKRTADGSEFEKRTADGSEFESPKKKAKVE

SEQ ID NO: 7501 - protein, 2102 aa, synthetic construct
MPAAKRVKLDGGDKKYSIGLDIGTNSVGWAVITDEYKVPSKKFKVLGNTDRHSIKKNLIGALLFDSGETAEATRLKRTARRRYTRRKNRICYLQEIFSNEMAKVDDSFFHRLEESFLVEEDKKHERHPIFGNIVDEVAYHEKYPTIYHLRKKLVDSTDKADLRLIYLALAHMIKFRGHFLIEGDLNPDNSDVDKLFIQLVQTYNQLFEENPINASGVDAKAILSARLSKSRRLENLIAQLPGEKKNGLFGNLIALSLGLTPNFKSNFDLAEDAKLQLSKDTYDDDLDNLLAQIGDQYADLFLAAKNLSDAILLSDILRVNTEITKAPLSASMIKRYDEHHQDLTLLKALVRQQLPEKYKEIFFDQSKNGYAGYIDGGASQEEFYKFIKPILEKMDGTEELLVKLNREDLLRKQRTFDNGSIPHQIHLGELHAILRRQEDFYPFLKDNREKIEKILTFRIPYYVGPLARGNSRFAWMTRKSEETITPWNFEEVVDKGASAQSFIERMTNFDKNLPNEKVLPKHSLLYEYFTVYNELTKVKYVTEGMRKPAFLSGEQKKAIVDLLFKTNRKVTVKQLKEDYFKKIECFDSVEISGVEDRFNASLGTYHDLLKIIKDKDFLDNEENEDILEDIVLTLTLFEDREMIEERLKTYAHLFDDKVMKQLKRRRYTGWGRLSRKLINGIRDKQSGKTILDFLKSDGFANRNFMQLIHDDSLTFKEDIQKAQVSGQGDSLHEHIANLAGSPAIKKGILQTVKVVDELVKVMGRHKPENIVIEMARENQTTQKGQKNSRERMKRIEEGIKELGSQILKEHPVENTQLQNEKLYLYYLQNGRDMYVDQELDINRLSDYDVDHIVPQSFLKDDSIDNKVLTRSDKARGKSDNVPSEEVVKKMKNYWRQLLNAKLITQRKFDNLTKAERGGLSELDKAGFIKRQLVETRQITKHVAQILDSRMNTKYDENDKLIREVKVITLKSKLVSDFRKDFQFYKVREINNYHHAHDAYLNAVVGTALIKKYPKLESEFVYGDYKVYDVRKMIAKSEQEIGKATAKYFFYSNIMNFFKTEITLANGEIRKRPLIETNGETGEIVWDKGRDFATVRKVLSMPQVNIVKKTEVQTGGFSKESILPKRNSDKLIARKKDWDPKKYGGFDSPTVAYSVLVVAKVEKGKSKKLKSVKELLGITIMERSSFEKNPIDFLEAKGYKEVKKDLIIKLPKYSLFELENGRKRMLASAGELQKGNELALPSKYVNFLYLASHYEKLKGSPEDNEQKQLFVEQHKHYLDEIIEQISEFSKRVILADANLDKVLSAYNKHRDKPIREQAENIIHLFTLTNLGAPAAFKYFDTTIDRKRYTSTKEVLDATLIHQSITGLYETRIDLSQLGGDGGEAAAKPAPGGGGGTVSLQDEHRLFDIPVTTSLPDVWLQDFPQAWAETGGLGRAKCQAPIIIDLKPTAVPVSIKQYPMSLEAHMGIRQHIIKFLELGVLRPCRSPWNTPLLPVKKPGTQDYRPVQDLREINKRTVDIHPTVPNPYNLLSTLKPDYSWYTVLDLKDAFFCLPLAPQSQELFAFEWKDPERGISGQLTWTRLPQGFKNSPTLFNEALHRDLTDFRTQHPEVTLLQYVDDLLLAAPTKKACTQGTRHLLQELGEKGYRASAKKAQICQTKVTYLGYILSEGKRWLTPGRIETVARIPPPRNPREVREFLGKAGFCRLFIPGFAELAAPLYALTKPSTPFTWQTEHQLAFEALKKALLSAPALGLPDTSKPFTLFLDERQGIAKGVLTQKLGPWKRPVAYLSKKLDPVAAGWPPCLRIMAATAMLVKDSAKLTLGQPLTVITPHTLEAIVRQPPDRWITNARLTHYQALLLDTDRVQFGPPVTLNPATLLPVPENQPSPHDCRQVLAETHGTREDLKDQELPDADHTWYTDGSSYLDSGTRRAGAAVVDGHNTIWAQSLPPGTSAQKAELIALTKALELSKGKKANIYTDSRYAFATAHTHGSIYERRGWLTSEGKEIKNKAEIIALLKALFLPQEVAIIHCPGHQKGQDPVAVGNRQADRVARQAAMAEVLTLATEPDNTSHITAGKRTADGSEFEKRTADGSEFESPKKKAKVE

SEQ ID NO: 7502 - protein, 2095 aa, synthetic construct
MPAAKRVKLDGGDKKYSIGLDIGTNSVGWAVITDEYKVPSKKFKVLGNTDRHSIKKNLIGALLFDSGETAEATRLKRTARRRYTRRKNRICYLQEIFSNEMAKVDDSFFHRLEESFLVEEDKKHERHPIFGNIVDEVAYHEKYPTIYHLRKKLVDSTDKADLRLIYLALAHMIKFRGHFLIEGDLNPDNSDVDKLFIQLVQTYNQLFEENPINASGVDAKAILSARLSKSRRLENLIAQLPGEKKNGLFGNLIALSLGLTPNFKSNFDLAEDAKLQLSKDTYDDDLDNLLAQIGDQYADLFLAAKNLSDAILLSDILRVNTEITKAPLSASMIKRYDEHHQDLTLLKALVRQQLPEKYKEIFFDQSKNGYAGYIDGGASQEEFYKFIKPILEKMDGTEELLVKLNREDLLRKQRTFDNGSIPHQIHLGELHAILRRQEDFYPFLKDNREKIEKILTFRIPYYVGPLARGNSRFAWMTRKSEETITPWNFEEVVDKGASAQSFIERMTNFDKNLPNEKVLPKHSLLYEYFTVYNELTKVKYVTEGMRKPAFLSGEQKKAIVDLLFKTNRKVTVKQLKEDYFKKIECFDSVEISGVEDRFNASLGTYHDLLKIIKDKDFLDNEENEDILEDIVLTLTLFEDREMIEERLKTYAHLFDDKVMKQLKRRRYTGWGRLSRKLINGIRDKQSGKTILDFLKSDGFANRNFMQLIHDDSLTFKEDIQKAQVSGQGDSLHEHIANLAGSPAIKKGILQTVKVVDELVKVMGRHKPENIVIEMARENQTTQKGQKNSRERMKRIEEGIKELGSQILKEHPVENTQLQNEKLYLYYLQNGRDMYVDQELDINRLSDYDVDHIVPQSFLKDDSIDNKVLTRSDKARGKSDNVPSEEVVKKMKNYWRQLLNAKLITQRKFDNLTKAERGGLSELDKAGFIKRQLVETRQITKHVAQILDSRMNTKYDENDKLIREVKVITLKSKLVSDFRKDFQFYKVREINNYHHAHDAYLNAVVGTALIKKYPKLESEFVYGDYKVYDVRKMIAKSEQEIGKATAKYFFYSNIMNFFKTEITLANGEIRKRPLIETNGETGEIVWDKGRDFATVRKVLSMPQVNIVKKTEVQTGGFSKESILPKRNSDKLIARKKDWDPKKYGGFDSPTVAYSVLVVAKVEKGKSKKLKSVKELLGITIMERSSFEKNPIDFLEAKGYKEVKKDLIIKLPKYSLFELENGRKRMLASAGELQKGNELALPSKYVNFLYLASHYEKLKGSPEDNEQKQLFVEQHKHYLDEIIEQISEFSKRVILADANLDKVLSAYNKHRDKPIREQAENIIHLFTLTNLGAPAAFKYFDTTIDRKRYTSTKEVLDATLIHQSITGLYETRIDLSQLGGDGGEAAAKPAPGGGGGTLQLEEEYRLFEPESTQKQEMDIWLKNFPQAWAETGGMGTAHCQAPVLIQLKATATPISIRQYPMPHEAYQGIKPHIRRMLDQGILKPCQSPWNTPLLPVKKPGTEDYRPVQDLREVNKRVEDIHPTVPNPYNLLSTLPPSHPWYTVLDLKDAFFCLRLHSESQLLFAFEWRDPEIGLSGQLTWTRLPQGFKNSPTLFNEALHSDLADFRVRYPALVLLQYVDDLLLAAATRTECLEGTKALLETLGNKGYRASAKKAQICLQEVTYLGYSLKDGQRWLTKARKEAILSIPVPKNSRQVREFLGKAGYCRLFIPGFAELAAPLYPLTRPGTLFQWGTEQQLAFEDIKKALLSSPALGLPDITKPFELFIDENSGFAKGVLVQKLGPWKRPVAYLSKKLDTVASGWPPCLRMVAAIAILVKDAGKLTLGQPLTILTSHPVEALVRQPPNKWLSNARMTHYQAMLLDAERVHFGPTVSLNPATLLPLPSGGNHHDCLQILAETHGTRPDLTDQPLPDADLTWYTDGSSFIRNGEREAGAAVTTESEVIWAAPLPPGTSAQRAELIALTQALKMAEGKKLTVYTDSRYAFATTHVHGEIYRRRGWLTSEGKEIKNKNEILALLEALFLPKRLSIIHCPGHQKGDSPQAKGNRLADDTAKKAATETHSSLTVLPAGKRTADGSEFEKRTADGSEFESPKKKAKVE

SEQ ID NO: 7503 - protein, 2176 aa, synthetic construct
MPAAKRVKLDGGDKKYSIGLDIGTNSVGWAVITDEYKVPSKKFKVLGNTDRHSIKKNLIGALLFDSGETAEATRLKRTARRRYTRRKNRICYLQEIFSNEMAKVDDSFFHRLEESFLVEEDKKHERHPIFGNIVDEVAYHEKYPTIYHLRKKLVDSTDKADLRLIYLALAHMIKFRGHFLIEGDLNPDNSDVDKLFIQLVQTYNQLFEENPINASGVDAKAILSARLSKSRRLENLIAQLPGEKKNGLFGNLIALSLGLTPNFKSNFDLAEDAKLQLSKDTYDDDLDNLLAQIGDQYADLFLAAKNLSDAILLSDILRVNTEITKAPLSASMIKRYDEHHQDLTLLKALVRQQLPEKYKEIFFDQSKNGYAGYIDGGASQEEFYKFIKPILEKMDGTEELLVKLNREDLLRKQRTFDNGSIPHQIHLGELHAILRRQEDFYPFLKDNREKIEKILTFRIPYYVGPLARGNSRFAWMTRKSEETITPWNFEEVVDKGASAQSFIERMTNFDKNLPNEKVLPKHSLLYEYFTVYNELTKVKYVTEGMRKPAFLSGEQKKAIVDLLFKTNRKVTVKQLKEDYFKKIECFDSVEISGVEDRFNASLGTYHDLLKIIKDKDFLDNEENEDILEDIVLTLTLFEDREMIEERLKTYAHLFDDKVMKQLKRRRYTGWGRLSRKLINGIRDKQSGKTILDFLKSDGFANRNFMQLIHDDSLTFKEDIQKAQVSGQGDSLHEHIANLAGSPAIKKGILQTVKVVDELVKVMGRHKPENIVIEMARENQTTQKGQKNSRERMKRIEEGIKELGSQILKEHPVENTQLQNEKLYLYYLQNGRDMYVDQELDINRLSDYDVDHIVPQSFLKDDSIDNKVLTRSDKARGKSDNVPSEEVVKKMKNYWRQLLNAKLITQRKFDNLTKAERGGLSELDKAGFIKRQLVETRQITKHVAQILDSRMNTKYDENDKLIREVKVITLKSKLVSDFRKDFQFYKVREINNYHHAHDAYLNAVVGTALIKKYPKLESEFVYGDYKVYDVRKMIAKSEQEIGKATAKYFFYSNIMNFFKTEITLANGEIRKRPLIETNGETGEIVWDKGRDFATVRKVLSMPQVNIVKKTEVQTGGFSKESILPKRNSDKLIARKKDWDPKKYGGFDSPTVAYSVLVVAKVEKGKSKKLKSVKELLGITIMERSSFEKNPIDFLEAKGYKEVKKDLIIKLPKYSLFELENGRKRMLASAGELQKGNELALPSKYVNFLYLASHYEKLKGSPEDNEQKQLFVEQHKHYLDEIIEQISEFSKRVILADANLDKVLSAYNKHRDKPIREQAENIIHLFTLTNLGAPAAFKYFDTTIDRKRYTSTKEVLDATLIHQSITGLYETRIDLSQLGGDGGEAAAKPAPGGGGGMNPLQLLQPLPAEIKGTKLLAHWNSGATITCIPESFLEDEQPIKKTLIKTIHGEKQQNVYYVTFKVKGRKVEAEVIASPYEYILLSPTDVPWLTQQPLQLTILVPLQEYQEKILSKTALPEDQKQQLKTLFVKYDNLWQHWENQVGHRKIRPHNIATGDYPPRPQKQYPINPKAKPSIQIVIDDLLKQGVLTPQNSTMNTPVYPVPKPDGRWRMVLDYREVNKTIPLTAAQNQHSAGILATIVRQKYKTTLDLANGFWAHPITPESYWLTAFTWQGKQYCWTRLPQGFLNSPALFNADVVDLLKEIPNVQVYVDDIYLSHDDPKEHVQQLEKVFQILLQAGYVVSLKKSEIGQKTVEFLGFNITKEGRGLTDTFKTKLLNITPPKDLKQLQSILGLLNFARNFIPNFAELVQPLYNLIAPAKGKYIEWSEENTKQLNMVIEALNTASNLEERLPEQRLVIKVNTSPSAGYVRYYNETGKKPIMYLNYVFSKAELKFSMLEKLLTTMHKALIKAMDLAMGQEILVYSPIVSMTKIQKTPLPERKALPIRWITWMTYLEDPRIQFHYDKTLPELKHIPDVYTSSQSPVKHPSQYEGVFYTDGSAIKSPDPTKSNNAGMGIVHATYKPEYQVLNQWSIPLGNHTAQMAEIAAVEFACKKALKIPGPVLVITDSFYVAESANKELPYWKSNGFVNNKKKPLKHISKWKSIAECLSMKPDITIQHEKGISLQIPVFILKGNALADKLATQGSYVVNAGKRTADGSEFEKRTADGSEFESPKKKAKVE

SEQ ID NO: 7504 - protein, 2094 aa, synthetic construct
MPAAKRVKLDGGDKKYSIGLDIGTNSVGWAVITDEYKVPSKKFKVLGNTDRHSIKKNLIGALLFDSGETAEATRLKRTARRRYTRRKNRICYLQEIFSNEMAKVDDSFFHRLEESFLVEEDKKHERHPIFGNIVDEVAYHEKYPTIYHLRKKLVDSTDKADLRLIYLALAHMIKFRGHFLIEGDLNPDNSDVDKLFIQLVQTYNQLFEENPINASGVDAKAILSARLSKSRRLENLIAQLPGEKKNGLFGNLIALSLGLTPNFKSNFDLAEDAKLQLSKDTYDDDLDNLLAQIGDQYADLFLAAKNLSDAILLSDILRVNTEITKAPLSASMIKRYDEHHQDLTLLKALVRQQLPEKYKEIFFDQSKNGYAGYIDGGASQEEFYKFIKPILEKMDGTEELLVKLNREDLLRKQRTFDNGSIPHQIHLGELHAILRRQEDFYPFLKDNREKIEKILTFRIPYYVGPLARGNSRFAWMTRKSEETITPWNFEEVVDKGASAQSFIERMTNFDKNLPNEKVLPKHSLLYEYFTVYNELTKVKYVTEGMRKPAFLSGEQKKAIVDLLFKTNRKVTVKQLKEDYFKKIECFDSVEISGVEDRFNASLGTYHDLLKIIKDKDFLDNEENEDILEDIVLTLTLFEDREMIEERLKTYAHLFDDKVMKQLKRRRYTGWGRLSRKLINGIRDKQSGKTILDFLKSDGFANRNFMQLIHDDSLTFKEDIQKAQVSGQGDSLHEHIANLAGSPAIKKGILQTVKVVDELVKVMGRHKPENIVIEMARENQTTQKGQKNSRERMKRIEEGIKELGSQILKEHPVENTQLQNEKLYLYYLQNGRDMYVDQELDINRLSDYDVDHIVPQSFLKDDSIDNKVLTRSDKARGKSDNVPSEEVVKKMKNYWRQLLNAKLITQRKFDNLTKAERGGLSELDKAGFIKRQLVETRQITKHVAQILDSRMNTKYDENDKLIREVKVITLKSKLVSDFRKDFQFYKVREINNYHHAHDAYLNAVVGTALIKKYPKLESEFVYGDYKVYDVRKMIAKSEQEIGKATAKYFFYSNIMNFFKTEITLANGEIRKRPLIETNGETGEIVWDKGRDFATVRKVLSMPQVNIVKKTEVQTGGFSKESILPKRNSDKLIARKKDWDPKKYGGFDSPTVAYSVLVVAKVEKGKSKKLKSVKELLGITIMERSSFEKNPIDFLEAKGYKEVKKDLIIKLPKYSLFELENGRKRMLASAGELQKGNELALPSKYVNFLYLASHYEKLKGSPEDNEQKQLFVEQHKHYLDEIIEQISEFSKRVILADANLDKVLSAYNKHRDKPIREQAENIIHLFTLTNLGAPAAFKYFDTTIDRKRYTSTKEVLDATLIHQSITGLYETRIDLSQLGGDGGEAAAKPAPGGGGGVLNLEEEYRLHEKPVPSSIDPSWLQLFPTVWAERAGMGLANQVPPVVVELRSGASPVAVRQYPMSKEAREGIRPHIQKFLDLGVLVPCRSPWNTPLLPVKKPGTNDYRPVQDLREINKRVQDIHPTVPNPYNLLSSLPPSYTWYSVLDLKDAFFCLRLHPNSQPLFAFEWKDPEKGNTGQLTWTRLPQGFKNSPTLFNEALHRDLAPFRALNPQVVLLQYVDDLLVAAPTYEDCKKGTQKLLQELSKLGYRVSAKKAQLCQREVTYLGYLLKEGKRWLTPARKATVMKIPVPTTPRQVREFLGKAGFCRLFIPGFASLAAPLYPLTKPSIPFIWTEEHQQAFDHIKKALLSAPALALPDLTKPFTLYIDERAGVARGVLTQTLGPWRRPVAYLSKKLDPVASGWPTCLKAVAAVALLLKDADKLTLGQNVTVIASHSLESIVRQPPDRWMTNARMTHYQSLLLNERVSFAPPAVLNPATLLPVESEATPVHRCSEILAEETGTRRDLEDQPLPGVPTWYTDGSSFITEGKRRAGAPIVDGKRTVWASSLPEGTSAQKAELVALTQALRLAEGKNINIYTDSRYAFATAHIHGAIYKQRGWLTSAGKDIKNKEEILALLEAIHLPRRVAIIHCPGHQRGSNPVATGNRRADEAAKQAALSTRVLAGTTKPAGKRTADGSEFEKRTADGSEFESPKKKAKVE

SEQ ID NO: 7505 - protein, 2218 aa, synthetic construct
MPAAKRVKLDGGDKKYSIGLDIGTNSVGWAVITDEYKVPSKKFKVLGNTDRHSIKKNLIGALLFDSGETAEATRLKRTARRRYTRRKNRICYLQEIFSNEMAKVDDSFFHRLEESFLVEEDKKHERHPIFGNIVDEVAYHEKYPTIYHLRKKLVDSTDKADLRLIYLALAHMIKFRGHFLIEGDLNPDNSDVDKLFIQLVQTYNQLFEENPINASGVDAKAILSARLSKSRRLENLIAQLPGEKKNGLFGNLIALSLGLTPNFKSNFDLAEDAKLQLSKDTYDDDLDNLLAQIGDQYADLFLAAKNLSDAILLSDILRVNTEITKAPLSASMIKRYDEHHQDLTLLKALVRQQLPEKYKEIFFDQSKNGYAGYIDGGASQEEFYKFIKPILEKMDGTEELLVKLNREDLLRKQRTFDNGSIPHQIHLGELHAILRRQEDFYPFLKDNREKIEKILTFRIPYYVGPLARGNSRFAWMTRKSEETITPWNFEEVVDKGASAQSFIERMTNFDKNLPNEKVLPKHSLLYEYFTVYNELTKVKYVTEGMRKPAFLSGEQKKAIVDLLFKTNRKVTVKQLKEDYFKKIECFDSVEISGVEDRFNASLGTYHDLLKIIKDKDFLDNEENEDILEDIVLTLTLFEDREMIEERLKTYAHLFDDKVMKQLKRRRYTGWGRLSRKLINGIRDKQSGKTILDFLKSDGFANRNFMQLIHDDSLTFKEDIQKAQVSGQGDSLHEHIANLAGSPAIKKGILQTVKVVDELVKVMGRHKPENIVIEMARENQTTQKGQKNSRERMKRIEEGIKELGSQILKEHPVENTQLQNEKLYLYYLQNGRDMYVDQELDINRLSDYDVDHIVPQSFLKDDSIDNKVLTRSDKARGKSDNVPSEEVVKKMKNYWRQLLNAKLITQRKFDNLTKAERGGLSELDKAGFIKRQLVETRQITKHVAQILDSRMNTKYDENDKLIREVKVITLKSKLVSDFRKDFQFYKVREINNYHHAHDAYLNAVVGTALIKKYPKLESEFVYGDYKVYDVRKMIAKSEQEIGKATAKYFFYSNIMNFFKTEITLANGEIRKRPLIETNGETGEIVWDKGRDFATVRKVLSMPQVNIVKKTEVQTGGFSKESILPKRNSDKLIARKKDWDPKKYGGFDSPTVAYSVLVVAKVEKGKSKKLKSVKELLGITIMERSSFEKNPIDFLEAKGYKEVKKDLIIKLPKYSLFELENGRKRMLASAGELQKGNELALPSKYVNFLYLASHYEKLKGSPEDNEQKQLFVEQHKHYLDEIIEQISEFSKRVILADANLDKVLSAYNKHRDKPIREQAENIIHLFTLTNLGAPAAFKYFDTTIDRKRYTSTKEVLDATLIHQSITGLYETRIDLSQLGGDGGEAAAKPAPGGGGGTLGDQGSRGSDPLPEPRVTLTVEGIPTEFLVNTGAEHSVLTKPMGKMGSKRTVVAGATGSKVYPWTTKRLLKIGQKQVTHSFLVIPECPAPLLGRDLLTKLKAQIQFSTEGPQVTWEDRPAMCLVLNLEEEYRLHEKPVPPSIDPSWLQLFPMVWAEKAGMGLANQVPPVVVELKSDASPVAVRQYPMSKEAREGIRPHIQRFLDLGILVPCQSPWNTPLLPVKKPGTNDYRPVQDLREVNKRVQDIHPTVPNPYNLLSSLPPSHTWYSVLDLKDAFFCLKLHPNSQPLFAFEWRDPEKGNTGQLTWTRLPQGFKNSPTLFNEALHRDLASFRALNPQVVMLQYVDDLLVAAPTYRDCKEGTRRLLQELSKLGYRVSAKKAQLCREEVTYLGYLLKGGKRWLTPARKATVMKIPTPTTPRQVREFLGKAGFCRLFIPGFASLAAPLYPLTRPKVPFTWTEAHQEAFGRIKEALLSAPALALPDLTKPFALYVDEKEGVARGVLTQTLGPWRRPVAYLSKKLDPVASGWPTCLKAIAAVALLLKDADKLTLGQNVLVIAPHNLESIVRQPPDRWMTNARMTHYQSLLLNERVSFAPPAILNPATLLPVESDDTPIHICSEILAEETGTRPDLRDQPLPGVPAWYTDGSSFIMDGRRQAGAAIVDNKRTVWASNLPEGTSAQKAELIALTQALRLAEGKSINIYTDSRYAFATAHVHGAIYKQRGWLTSAGKDIKNKEEILALLEAIHLPKRVAIIHCPGHQRGTDPVATGNRKADEAAKQAAQSTRILTETTKNAGKRTADGSEFEKRTADGSEFESPKKKAKVE

SEQ ID NO: 7506 - protein, 2096 aa, synthetic construct
MPAAKRVKLDGGDKKYSIGLDIGTNSVGWAVITDEYKVPSKKFKVLGNTDRHSIKKNLIGALLFDSGETAEATRLKRTARRRYTRRKNRICYLQEIFSNEMAKVDDSFFHRLEESFLVEEDKKHERHPIFGNIVDEVAYHEKYPTIYHLRKKLVDSTDKADLRLIYLALAHMIKFRGHFLIEGDLNPDNSDVDKLFIQLVQTYNQLFEENPINASGVDAKAILSARLSKSRRLENLIAQLPGEKKNGLFGNLIALSLGLTPNFKSNFDLAEDAKLQLSKDTYDDDLDNLLAQIGDQYADLFLAAKNLSDAILLSDILRVNTEITKAPLSASMIKRYDEHHQDLTLLKALVRQQLPEKYKEIFFDQSKNGYAGYIDGGASQEEFYKFIKPILEKMDGTEELLVKLNREDLLRKQRTFDNGSIPHQIHLGELHAILRRQEDFYPFLKDNREKIEKILTFRIPYYVGPLARGNSRFAWMTRKSEETITPWNFEEVVDKGASAQSFIERMTNFDKNLPNEKVLPKHSLLYEYFTVYNELTKVKYVTEGMRKPAFLSGEQKKAIVDLLFKTNRKVTVKQLKEDYFKKIECFDSVEISGVEDRFNASLGTYHDLLKIIKDKDFLDNEENEDILEDIVLTLTLFEDREMIEERLKTYAHLFDDKVMKQLKRRRYTGWGRLSRKLINGIRDKQSGKTILDFLKSDGFANRNFMQLIHDDSLTFKEDIQKAQVSGQGDSLHEHIANLAGSPAIKKGILQTVKVVDELVKVMGRHKPENIVIEMARENQTTQKGQKNSRERMKRIEEGIKELGSQILKEHPVENTQLQNEKLYLYYLQNGRDMYVDQELDINRLSDYDVDHIVPQSFLKDDSIDNKVLTRSDKARGKSDNVPSEEVVKKMKNYWRQLLNAKLITQRKFDNLTKAERGGLSELDKAGFIKRQLVETRQITKHVAQILDSRMNTKYDENDKLIREVKVITLKSKLVSDFRKDFQFYKVREINNYHHAHDAYLNAVVGTALIKKYPKLESEFVYGDYKVYDVRKMIAKSEQEIGKATAKYFFYSNIMNFFKTEITLANGEIRKRPLIETNGETGEIVWDKGRDFATVRKVLSMPQVNIVKKTEVQTGGFSKESILPKRNSDKLIARKKDWDPKKYGGFDSPTVAYSVLVVAKVEKGKSKKLKSVKELLGITIMERSSFEKNPIDFLEAKGYKEVKKDLIIKLPKYSLFELENGRKRMLASAGELQKGNELALPSKYVNFLYLASHYEKLKGSPEDNEQKQLFVEQHKHYLDEIIEQISEFSKRVILADANLDKVLSAYNKHRDKPIREQAENIIHLFTLTNLGAPAAFKYFDTTIDRKRYTSTKEVLDATLIHQSITGLYETRIDLSQLGGDGGEAAAKPAPGGGGGTLNLEDEYRLYETSAEPEVSPGSTWLSDFPQAWAETGGMGLAVRQAPLIIPLKATSTPVSIKQYPMSQEAKLGIKPHIQRLLDQGILVPCQSPWNTPLLPVKKPGTNDYRPVQDLREVNKRVEDIHPTVPNPYNLLSGLPPSHRWYTVLDLKDAFFCLRLHPTSQPLFAFEWRDPGMGISGQLTWTRLPQGFKNSPTLFDEALHRDLADFRIQHPDLILLQYVDDILLAATSELDCQQGTRALLLTLGNLGYRASAKKAQLCQKQVKYLGYLLKEGQRWLTEARKETVMGQPTPKTPRQLREFLGTAGFCRLWIPGFAEMAAPLYPLTKTGTLFNWGPDQQKAYQEIKQALLTAPALGLPDLTKPFELFVDEKQGYAKGVLTQKLGPWRRPVAYLSKKLDPVAAGWPPCLRMVAAIAVLRKDAGKLTMGQPLVILAPHAVEALVKQPPDRWLSNARMTHYQAMLLDTDRVQFGPVVALNPATLLPLPEEGAPHDCLEILAETHGTRPDLTDQPIPDADHTWYTDGSSFLQEGQRKAGAAVTTETEVIWARALPAGTSAQRAELIALTQALKMAEGKRLNVYTDSRYAFATAHIHGEIYRRRGLLTSEGREIKNKSEILALLKALFLPKRLSIIHCLGHQKGDSAEARGNRLADQAAREAAIKTPPDTSTLLAGKRTADGSEFEKRTADGSEFESPKKKAKVE

SEQ ID NO: 7507 - protein, 2096 aa, synthetic construct
MPAAKRVKLDGGDKKYSIGLDIGTNSVGWAVITDEYKVPSKKFKVLGNTDRHSIKKNLIGALLFDSGETAEATRLKRTARRRYTRRKNRICYLQEIFSNEMAKVDDSFFHRLEESFLVEEDKKHERHPIFGNIVDEVAYHEKYPTIYHLRKKLVDSTDKADLRLIYLALAHMIKFRGHFLIEGDLNPDNSDVDKLFIQLVQTYNQLFEENPINASGVDAKAILSARLSKSRRLENLIAQLPGEKKNGLFGNLIALSLGLTPNFKSNFDLAEDAKLQLSKDTYDDDLDNLLAQIGDQYADLFLAAKNLSDAILLSDILRVNTEITKAPLSASMIKRYDEHHQDLTLLKALVRQQLPEKYKEIFFDQSKNGYAGYIDGGASQEEFYKFIKPILEKMDGTEELLVKLNREDLLRKQRTFDNGSIPHQIHLGELHAILRRQEDFYPFLKDNREKIEKILTFRIPYYVGPLARGNSRFAWMTRKSEETITPWNFEEVVDKGASAQSFIERMTNFDKNLPNEKVLPKHSLLYEYFTVYNELTKVKYVTEGMRKPAFLSGEQKKAIVDLLFKTNRKVTVKQLKEDYFKKIECFDSVEISGVEDRFNASLGTYHDLLKIIKDKDFLDNEENEDILEDIVLTLTLFEDREMIEERLKTYAHLFDDKVMKQLKRRRYTGWGRLSRKLINGIRDKQSGKTILDFLKSDGFANRNFMQLIHDDSLTFKEDIQKAQVSGQGDSLHEHIANLAGSPAIKKGILQTVKVVDELVKVMGRHKPENIVIEMARENQTTQKGQKNSRERMKRIEEGIKELGSQILKEHPVENTQLQNEKLYLYYLQNGRDMYVDQELDINRLSDYDVDHIVPQSFLKDDSIDNKVLTRSDKARGKSDNVPSEEVVKKMKNYWRQLLNAKLITQRKFDNLTKAERGGLSELDKAGFIKRQLVETRQITKHVAQILDSRMNTKYDENDKLIREVKVITLKSKLVSDFRKDFQFYKVREINNYHHAHDAYLNAVVGTALIKKYPKLESEFVYGDYKVYDVRKMIAKSEQEIGKATAKYFFYSNIMNFFKTEITLANGEIRKRPLIETNGETGEIVWDKGRDFATVRKVLSMPQVNIVKKTEVQTGGFSKESILPKRNSDKLIARKKDWDPKKYGGFDSPTVAYSVLVVAKVEKGKSKKLKSVKELLGITIMERSSFEKNPIDFLEAKGYKEVKKDLIIKLPKYSLFELENGRKRMLASAGELQKGNELALPSKYVNFLYLASHYEKLKGSPEDNEQKQLFVEQHKHYLDEIIEQISEFSKRVILADANLDKVLSAYNKHRDKPIREQAENIIHLFTLTNLGAPAAFKYFDTTIDRKRYTSTKEVLDATLIHQSITGLYETRIDLSQLGGDGGEAAAKPAPGGGGGTLNLEDEYRLYETSAEPEVSPGSTWLSDFPQAWAETGGMGLAVRQAPLIIPLKATSTPVSIKQYPMSQEAKLGIKPHIQRLLDQGILVPCQSPWNTPLLPVKKPGTNDYRPVQDLREVNKRVEDIHPTVPNPYNLLSGLPPSHRWYTVLDLKDAFFCLRLHPTSQPLFAFEWRDPGMGISGQLTWTRLPQGFKNSPTLFNEALHRDLADFRIQHPDLILLQYVDDILLAATSELDCQQGTRALLLTLGNLGYRASAKKAQLCQKQVKYLGYLLKEGQRWLTEARKETVMGQPTPKTPRQLREFLGTAGFCRLWIPGFAEMAAPLYPLTKPGTLFNWGPDQQKAYQEIKQALLTAPALGLPDLTKPFELFVDEKQGYAKGVLTQKLGPWRRPVAYLSKKLDPVAAGWPPCLRMVAAIAVLRKDAGKLTMGQPLVILAPHAVEALVKQPPDRWLSNARMTHYQAMLLDTDRVQFGPVVALNPATLLPLPEEGAPHDCLEILAETHGTRPDLTDQPIPDADHTWYTDGSSFLQEGQRKAGAAVTTETEVIWARALPAGTSAQRAELIALTQALKMAEGKRLNVYTDSRYAFATAHIHGEIYRRRGWLTSEGREIKNKSEILALLKALFLPKRLSIIHCLGHQKGDSAEARGNRLADQAAREAAIKTPPDTSTLLAGKRTADGSEFEKRTADGSEFESPKKKAKVE

SEQ ID NO: 7508 - protein, 2096 aa, synthetic construct
MPAAKRVKLDGGDKKYSIGLDIGTNSVGWAVITDEYKVPSKKFKVLGNTDRHSIKKNLIGALLFDSGETAEATRLKRTARRRYTRRKNRICYLQEIFSNEMAKVDDSFFHRLEESFLVEEDKKHERHPIFGNIVDEVAYHEKYPTIYHLRKKLVDSTDKADLRLIYLALAHMIKFRGHFLIEGDLNPDNSDVDKLFIQLVQTYNQLFEENPINASGVDAKAILSARLSKSRRLENLIAQLPGEKKNGLFGNLIALSLGLTPNFKSNFDLAEDAKLQLSKDTYDDDLDNLLAQIGDQYADLFLAAKNLSDAILLSDILRVNTEITKAPLSASMIKRYDEHHQDLTLLKALVRQQLPEKYKEIFFDQSKNGYAGYIDGGASQEEFYKFIKPILEKMDGTEELLVKLNREDLLRKQRTFDNGSIPHQIHLGELHAILRRQEDFYPFLKDNREKIEKILTFRIPYYVGPLARGNSRFAWMTRKSEETITPWNFEEVVDKGASAQSFIERMTNFDKNLPNEKVLPKHSLLYEYFTVYNELTKVKYVTEGMRKPAFLSGEQKKAIVDLLFKTNRKVTVKQLKEDYFKKIECFDSVEISGVEDRFNASLGTYHDLLKIIKDKDFLDNEENEDILEDIVLTLTLFEDREMIEERLKTYAHLFDDKVMKQLKRRRYTGWGRLSRKLINGIRDKQSGKTILDFLKSDGFANRNFMQLIHDDSLTFKEDIQKAQVSGQGDSLHEHIANLAGSPAIKKGILQTVKVVDELVKVMGRHKPENIVIEMARENQTTQKGQKNSRERMKRIEEGIKELGSQILKEHPVENTQLQNEKLYLYYLQNGRDMYVDQELDINRLSDYDVDHIVPQSFLKDDSIDNKVLTRSDKARGKSDNVPSEEVVKKMKNYWRQLLNAKLITQRKFDNLTKAERGGLSELDKAGFIKRQLVETRQITKHVAQILDSRMNTKYDENDKLIREVKVITLKSKLVSDFRKDFQFYKVREINNYHHAHDAYLNAVVGTALIKKYPKLESEFVYGDYKVYDVRKMIAKSEQEIGKATAKYFFYSNIMNFFKTEITLANGEIRKRPLIETNGETGEIVWDKGRDFATVRKVLSMPQVNIVKKTEVQTGGFSKESILPKRNSDKLIARKKDWDPKKYGGFDSPTVAYSVLVVAKVEKGKSKKLKSVKELLGITIMERSSFEKNPIDFLEAKGYKEVKKDLIIKLPKYSLFELENGRKRMLASAGELQKGNELALPSKYVNFLYLASHYEKLKGSPEDNEQKQLFVEQHKHYLDEIIEQISEFSKRVILADANLDKVLSAYNKHRDKPIREQAENIIHLFTLTNLGAPAAFKYFDTTIDRKRYTSTKEVLDATLIHQSITGLYETRIDLSQLGGDGGEAAAKPAPGGGGGTLGIEDEYRLHETSTEPDVSLGSTWLSDFPQAWAETGGMGLAVRQAPLIIPLKATSTPVSIQQYPMSHEARLGIKPHIQRLLDQGILVPCQSPWNTPLLPVKKPGTNDYRPVQDLREVNKRVEDIHPTVPNPYNLLSGLPPSHQWYTVLDLKDAFFCLRLHPTSQPLFAFEWRDPGMGISGQLTWTRLPQGFKNSPTLFNEALHRDLADFRIQHPDLILLQYVDDILLAATSELDCQQGTRALLQTLGDLGYRASAKKAQICQKQVKYLGYLLREGQRWLTEARKETVMGQPVPKTPRQLREFLGTAGFCRLWIPGFAEMAAPLYPLTKPGTLFSWGPDQQKAYQEIKQALLTAPALGLPDLTKPFELFVDEKQGYAKGVLTQKLGPWRRPVAYLSKKLDPVAAGWPPCLRMVAAIAVLTKDAGKLTMGQPLVILAPHAVEALVKQPPDRWLSNARMTHYQAMLLDTDRVQFGPVVALNPATLLPLPEEGAPHDCLEILAETHGTRPDLTDQPIPDADHTWYTDGSSFLQEGQRKAGAAVTTETEVIWAGALPAGTSAQRAELIALTQALKMAEGKRLNVYTDSRYAFATAHIHGEIYRRRGWLTSEGREIKNKSEILALLKALFLPKRLSIIHCLGHQKGDSAEARGNRLADQAAREAAIKTPPDTSTLLAGKRTADGSEFEKRTADGSEFESPKKKAKVE

SEQ ID NO: 7509 - protein, 2096 aa, synthetic construct; identical to SEQ ID NO: 4536

SEQ ID NO: 7510 - protein, 2096 aa, synthetic construct
MPAAKRVKLDGGDKKYSIGLDIGTNSVGWAVITDEYKVPSKKFKVLGNTDRHSIKKNLIGALLFDSGETAEATRLKRTARRRYTRRKNRICYLQEIFSNEMAKVDDSFFHRLEESFLVEEDKKHERHPIFGNIVDEVAYHEKYPTIYHLRKKLVDSTDKADLRLIYLALAHMIKFRGHFLIEGDLNPDNSDVDKLFIQLVQTYNQLFEENPINASGVDAKAILSARLSKSRRLENLIAQLPGEKKNGLFGNLIALSLGLTPNFKSNFDLAEDAKLQLSKDTYDDDLDNLLAQIGDQYADLFLAAKNLSDAILLSDILRVNTEITKAPLSASMIKRYDEHHQDLTLLKALVRQQLPEKYKEIFFDQSKNGYAGYIDGGASQEEFYKFIKPILEKMDGTEELLVKLNREDLLRKQRTFDNGSIPHQIHLGELHAILRRQEDFYPFLKDNREKIEKILTFRIPYYVGPLARGNSRFAWMTRKSEETITPWNFEEVVDKGASAQSFIERMTNFDKNLPNEKVLPKHSLLYEYFTVYNELTKVKYVTEGMRKPAFLSGEQKKAIVDLLFKTNRKVTVKQLKEDYFKKIECFDSVEISGVEDRFNASLGTYHDLLKIIKDKDFLDNEENEDILEDIVLTLTLFEDREMIEERLKTYAHLFDDKVMKQLKRRRYTGWGRLSRKLINGIRDKQSGKTILDFLKSDGFANRNFMQLIHDDSLTFKEDIQKAQVSGQGDSLHEHIANLAGSPAIKKGILQTVKVVDELVKVMGRHKPENIVIEMARENQTTQKGQKNSRERMKRIEEGIKELGSQILKEHPVENTQLQNEKLYLYYLQNGRDMYVDQELDINRLSDYDVDHIVPQSFLKDDSIDNKVLTRSDKARGKSDNVPSEEVVKKMKNYWRQLLNAKLITQRKFDNLTKAERGGLSELDKAGFIKRQLVETRQITKHVAQILDSRMNTKYDENDKLIREVKVITLKSKLVSDFRKDFQFYKVREINNYHHAHDAYLNAVVGTALIKKYPKLESEFVYGDYKVYDVRKMIAKSEQEIGKATAKYFFYSNIMNFFKTEITLANGEIRKRPLIETNGETGEIVWDKGRDFATVRKVLSMPQVNIVKKTEVQTGGFSKESILPKRNSDKLIARKKDWDPKKYGGFDSPTVAYSVLVVAKVEKGKSKKLKSVKELLGITIMERSSFEKNPIDFLEAKGYKEVKKDLIIKLPKYSLFELENGRKRMLASAGELQKGNELALPSKYVNFLYLASHYEKLKGSPEDNEQKQLFVEQHKHYLDEIIEQISEFSKRVILADANLDKVLSAYNKHRDKPIREQAENIIHLFTLTNLGAPAAFKYFDTTIDRKRYTSTKEVLDATLIHQSITGLYETRIDLSQLGGDGGEAAAKPAPGGGGGTLNIEDEYRLHETSKGPDVPLGSTWLSDFPQAWAETGGMGLAVRQAPLIIPLKATSTPVSIKQYPMSQEARLGIKPHIQRLLDQGILVPCQSPWNTPLLPVKKPGTNDYRPVQDLREVNKRVEDIHPTVPNPYNLLSGLPPSHQWYTVLDLKDAFFCLRLHPTSQSLFAFEWRDPEMGISGQLTWTRLPQGFKNSPTLFNEALHRDLADFRIQHPDLILLQYVDDLLLAATSELDCQQGTRALLQTLGDLGYRASAKKAQICQKQVKYLGYLLKEGQRWLTEARKETVMGQPTPKTPRQLREFLGTAGFCRLWIPGFAEMAAPLYPLTKPGTLFEWGPDQQKAYQEIKQALLTAPALGLPDLTKPFELFVDEKQGYAKGVLTQKLGPWRRPVAYLSKKLDPVAAGWPPCLRMVAAIAVLTKDAGKLTMGQPLVILAPHAVEALVKQPPDRWLSNARMTHYQALLLDTDRVQFGPIVALNPATLLPLPEEGLQHDCLDILAEAHGTRPDLTDQPLPDADHTWYTDGSSFLQEGQRKAGAAVTTETEVVWAKALPAGTSAQRAELIALTQALKMAEGKKLNVYTDSRYAFATAHIHGEIYRRRGWLTSEGKEIKNKDEILALLKALFLPKRLSIIHCPGHQKGNRAEARGNRMADQAAREVATRETPETSTLLAGKRTADGSEFEKRTADGSEFESPKKKAKVE

SEQ ID NO: 7511 - protein, 2096 aa, synthetic construct
MPAAKRVKLDGGDKKYSIGLDIGTNSVGWAVITDEYKVPSKKFKVLGNTDRHSIKKNLIGALLFDSGETAEATRLKRTARRRYTRRKNRICYLQEIFSNEMAKVDDSFFHRLEESFLVEEDKKHERHPIFGNIVDEVAYHEKYPTIYHLRKKLVDSTDKADLRLIYLALAHMIKFRGHFLIEGDLNPDNSDVDKLFIQLVQTYNQLFEENPINASGVDAKAILSARLSKSRRLENLIAQLPGEKKNGLFGNLIALSLGLTPNFKSNFDLAEDAKLQLSKDTYDDDLDNLLAQIGDQYADLFLAAKNLSDAILLSDILRVNTEITKAPLSASMIKRYDEHHQDLTLLKALVRQQLPEKYKEIFFDQSKNGYAGYIDGGASQEEFYKFIKPILEKMDGTEELLVKLNREDLLRKQRTFDNGSIPHQIHLGELHAILRRQEDFYPFLKDNREKIEKILTFRIPYYVGPLARGNSRFAWMTRKSEETITPWNFEEVVDKGASAQSFIERMTNFDKNLPNEKVLPKHSLLYEYFTVYNELTKVKYVTEGMRKPAFLSGEQKKAIVDLLFKTNRKVTVKQLKEDYFKKIECFDSVEISGVEDRFNASLGTYHDLLKIIKDKDFLDNEENEDILEDIVLTLTLFEDREMIEERLKTYAHLFDDKVMKQLKRRRYTGWGRLSRKLINGIRDKQSGKTILDFLKSDGFANRNFMQLIHDDSLTFKEDIQKAQVSGQGDSLHEHIANLAGSPAIKKGILQTVKVVDELVKVMGRHKPENIVIEMARENQTTQKGQKNSRERMKRIEEGIKELGSQILKEHPVENTQLQNEKLYLYYLQNGRDMYVDQELDINRLSDYDVDHIVPQSFLKDDSIDNKVLTRSDKARGKSDNVPSEEVVKKMKNYWRQLLNAKLITQRKFDNLTKAERGGLSELDKAGFIKRQLVETRQITKHVAQILDSRMNTKYDENDKLIREVKVITLKSKLVSDFRKDFQFYKVREINNYHHAHDAYLNAVVGTALIKKYPKLESEFVYGDYKVYDVRKMIAKSEQEIGKATAKYFFYSNIMNFFKTEITLANGEIRKRPLIETNGETGEIVWDKGRDFATVRKVLSMPQVNIVKKTEVQTGGFSKESILPKRNSDKLIARKKDWDPKKYGGFDSPTVAYSVLVVAKVEKGKSKKLKSVKELLGITIMERSSFEKNPIDFLEAKGYKEVKKDLIIKLPKYSLFELENGRKRMLASAGELQKGNELALPSKYVNFLYLASHYEKLKGSPEDNEQKQLFVEQHKHYLDEIIEQISEFSKRVILADANLDKVLSAYNKHRDKPIREQAENIIHLFTLTNLGAPAAFKYFDTTIDRKRYTSTKEVLDATLIHQSITGLYETRIDLSQLGGDGGEAAAKPAPGGGGGTLNIEDEHRLHETSKEPDVSLGSTWLSDFPQAWAETGGMGLAVRQAPLIIPLKATSTPVSIKQYPMSQEARLGIKPHIQRLLDQGILVPCQSPWNTPLLPVKKPGTNDYRPVQDLREVNKRVEDIHPTVPNPYNLLSGLPPSHQWYTVLDLKDAFFCLRLHPTSQPLFAFEWRDPEMGISGQLTWTRLPQGFKNSPTLFDEALHRDLADFRIQHPDLILLQYVDDLLLAATSELDCQQGTRALLQTLGNLGYRASAKKAQICQKQVKYLGYLLKEGQRWLTEARKETVMGQPTPKTPRQLREFLGTAGFCRLWIPGFAEMAAPLYPLTKTGTLFNWGPDQQKAYQEIKQALLTAPALGLPDLTKPFELFVDEKQGYAKGVLTQKLGPWRRPVAYLSKKLDPVAAGWPPCLRMVAAIAVLTKDAGKLTMGQPLVILAPHAVEALVKQPPDRWLSNARMTHYQALLLDTDRVQFGPVVALNPATLLPLPEEGLQHNCLDILAEAHGTRPDLTDQPLPDADHTWYTDGSSLLQEGQRKAGAAVTTETEVIWAKALPAGTSAQRAELIALTQALKMAEGKKLNVYTDSRYAFATAHIHGEIYRRRGLLTSEGKEIKNKDEILALLKALFLPKRLSIIHCPGHQKGHSAEARGNRMADQAARKAAITETPDTSTLLAGKRTADGSEFEKRTADGSEFESPKKKAKVE

SEQ ID NO: 7512 - protein, 2024 aa, synthetic construct
MPAAKRVKLDGGDKKYSIGLDIGTNSVGWAVITDEYKVPSKKFKVLGNTDRHSIKKNLIGALLFDSGETAEATRLKRTARRRYTRRKNRICYLQEIFSNEMAKVDDSFFHRLEESFLVEEDKKHERHPIFGNIVDEVAYHEKYPTIYHLRKKLVDSTDKADLRLIYLALAHMIKFRGHFLIEGDLNPDNSDVDKLFIQLVQTYNQLFEENPINASGVDAKAILSARLSKSRRLENLIAQLPGEKKNGLFGNLIALSLGLTPNFKSNFDLAEDAKLQLSKDTYDDDLDNLLAQIGDQYADLFLAAKNLSDAILLSDILRVNTEITKAPLSASMIKRYDEHHQDLTLLKALVRQQLPEKYKEIFFDQSKNGYAGYIDGGASQEEFYKFIKPILEKMDGTEELLVKLNREDLLRKQRTFDNGSIPHQIHLGELHAILRRQEDFYPFLKDNREKIEKILTFRIPYYVGPLARGNSRFAWMTRKSEETITPWNFEEVVDKGASAQSFIERMTNFDKNLPNEKVLPKHSLLYEYFTVYNELTKVKYVTEGMRKPAFLSGEQKKAIVDLLFKTNRKVTVKQLKEDYFKKIECFDSVEISGVEDRFNASLGTYHDLLKIIKDKDFLDNEENEDILEDIVLTLTLFEDREMIEERLKTYAHLFDDKVMKQLKRRRYTGWGRLSRKLINGIRDKQSGKTILDFLKSDGFANRNFMQLIHDDSLTFKEDIQKAQVSGQGDSLHEHIANLAGSPAIKKGILQTVKVVDELVKVMGRHKPENIVIEMARENQTTQKGQKNSRERMKRIEEGIKELGSQILKEHPVENTQLQNEKLYLYYLQNGRDMYVDQELDINRLSDYDVDHIVPQSFLKDDSIDNKVLTRSDKARGKSDNVPSEEVVKKMKNYWRQLLNAKLITQRKFDNLTKAERGGLSELDKAGFIKRQLVETRQITKHVAQILDSRMNTKYDENDKLIREVKVITLKSKLVSDFRKDFQFYKVREINNYHHAHDAYLNAVVGTALIKKYPKLESEFVYGDYKVYDVRKMIAKSEQEIGKATAKYFFYSNIMNFFKTEITLANGEIRKRPLIETNGETGEIVWDKGRDFATVRKVLSMPQVNIVKKTEVQTGGFSKESILPKRNSDKLIARKKDWDPKKYGGFDSPTVAYSVLVVAKVEKGKSKKLKSVKELLGITIMERSSFEKNPIDFLEAKGYKEVKKDLIIKLPKYSLFELENGRKRMLASAGELQKGNELALPSKYVNFLYLASHYEKLKGSPEDNEQKQLFVEQHKHYLDEIIEQISEFSKRVILADANLDKVLSAYNKHRDKPIREQAENIIHLFTLTNLGAPAAFKYFDTTIDRKRYTSTKEVLDATLIHQSITGLYETRIDLSQLGGDGGEAAAKPAPGGGGGGRDIMKDIKVRLMTDSPDDSQDLMIGAIESNLFADQISWKSDQPVWLNQWPLKQEKLQALQQLVTEQLQLGHLEESNSPWNTPVFVIKKKSGKWRLLQDLRAVNATMHDMGALQPGLPSPVAVPKGWEIIIIDLQDCFFNIKLHPEDCKRFAFSVPSPNFKRPYQRFQWKVLPQGMKNSPTLCQKFVDKAILTVRDKYQDSYIVHYMDDILLAHPSRSIVDEILTSMIQALNKHGLVVSTEKIQKYDNLKYLGTHIQGDSVSYQKLQIRTDKLRTLNDFQKLLGNINWIRPFLKLTTGELKPLFEILNGDSNPISTRKLTPEACKALQLMNERLSTARVKRLDLSQPWSLCILKTEYTPTACLWQDGVVEWIHLPHISPKVITPYDIFCTQLIIKGRHRSKELFSKDPDYIVVPYTKVQFDLLLQEKEDWPISLLGFLGEVHFHLPKDPLLTFTLQTAIIFPHMTSTTPLEKGIVIFTDGSANGRSVTYIQGREPIIKENTQNTAQQAEIVAVITAFEEVSQPFNLYTDSKYVTGLFPEIETATLSPRTKIYTELKHLQRLIHKRQEKFYIGHIRGHTGLPGPLAQGNAYADSLTRILTAGKRTADGSEFEKRTADGSEFESPKKKAKVE

SEQ ID NO: 7513 - protein, 2088 aa, synthetic construct
MPAAKRVKLDGGDKKYSIGLDIGTNSVGWAVITDEYKVPSKKFKVLGNTDRHSIKKNLIGALLFDSGETAEATRLKRTARRRYTRRKNRICYLQEIFSNEMAKVDDSFFHRLEESFLVEEDKKHERHPIFGNIVDEVAYHEKYPTIYHLRKKLVDSTDKADLRLIYLALAHMIKFRGHFLIEGDLNPDNSDVDKLFIQLVQTYNQLFEENPINASGVDAKAILSARLSKSRRLENLIAQLPGEKKNGLFGNLIALSLGLTPNFKSNFDLAEDAKLQLSKDTYDDDLDNLLAQIGDQYADLFLAAKNLSDAILLSDILRVNTEITKAPLSASMIKRYDEHHQDLTLLKALVRQQLPEKYKEIFFDQSKNGYAGYIDGGASQEEFYKFIKPILEKMDGTEELLVKLNREDLLRKQRTFDNGSIPHQIHLGELHAILRRQEDFYPFLKDNREKIEKILTFRIPYYVGPLARGNSRFAWMTRKSEETITPWNFEEVVDKGASAQSFIERMTNFDKNLPNEKVLPKHSLLYEYFTVYNELTKVKYVTEGMRKPAFLSGEQKKAIVDLLFKTNRKVTVKQLKEDYFKKIECFDSVEISGVEDRFNASLGTYHDLLKIIKDKDFLDNEENEDILEDIVLTLTLFEDREMIEERLKTYAHLFDDKVMKQLKRRRYTGWGRLSRKLINGIRDKQSGKTILDFLKSDGFANRNFMQLIHDDSLTFKEDIQKAQVSGQGDSLHEHIANLAGSPAIKKGILQTVKVVDELVKVMGRHKPENIVIEMARENQTTQKGQKNSRERMKRIEEGIKELGSQILKEHPVENTQLQNEKLYLYYLQNGRDMYVDQELDINRLSDYDVDHIVPQSFLKDDSIDNKVLTRSDKARGKSDNVPSEEVVKKMKNYWRQLLNAKLITQRKFDNLTKAERGGLSELDKAGFIKRQLVETRQITKHVAQILDSRMNTKYDENDKLIREVKVITLKSKLVSDFRKDFQFYKVREINNYHHAHDAYLNAVVGTALIKKYPKLESEFVYGDYKVYDVRKMIAKSEQEIGKATAKYFFYSNIMNFFKTEITLANGEIRKRPLIETNGETGEIVWDKGRDFATVRKVLSMPQVNIVKKTEVQTGGFSKESILPKRNSDKLIARKKDWDPKKYGGFDSPTVAYSVLVVAKVEKGKSKKLKSVKELLGITIMERSSFEKNPIDFLEAKGYKEVKKDLIIKLPKYSLFELENGRKRMLASAGELQKGNELALPSKYVNFLYLASHYEKLKGSPEDNEQKQLFVEQHKHYLDEIIEQISEFSKRVILADANLDKVLSAYNKHRDKPIREQAENIIHLFTLTNLGAPAAFKYFDTTIDRKRYTSTKEVLDATLIHQSITGLYETRIDLSQLGGDGGEAAAKPAPGGGGGLDDEYRLYSPLVKPDQNIQFWLEQFPQAWAETAGMGLAKQVPPQVIQLKASATPVSVRQYPLSKEAQEGIRPHVQRLIQQGILVPVQSPWNTPLLPVRKPGTNDYRPVQDLREVNKRVQDIHPTVPNPYNLLCALPPQRSWYTVLDLKDAFFCLRLHPTSQPLFAFEWRDPGTGRTGQLTWTRLPQGFKNSPTIFNEALHRDLANFRIQHPQVTLLQYVDDLLLAGATKQDCLEGTKALLLELSDLGYRASAKKAQICRREVTYLGYSLRDGQRWLTEARKKTVVQIPAPTTAKQVREFLGKAGFCRLFIPGFATLAAPLYPLTKPKGEFSWAPEHQKAFDAIKKALLSAPALALPDVTKPFTLYVDERKGVARGVLTQTLGPWRRPVAYLSKKLDPVASGWPVCLKAIAAVAILVKDADKLTLGQNITVIAPHALENIVRQPPDRWMTNARMTHYQSLLLTERVTFAPPAALNPATLLPEETDEPVTHDCHQLLIEETGVRKDLTDIPLTGEVLTWFTDGSSYVVEGKRMAGAAVVDGTRTIWASSLPEGTSAQKAELMALTQALRLAEGKSINIYTDSRYAFATAHVHGAIYKQRGWLTSAGREIKNKEEILSLLEALHLPKRLAIIHCPGHQKAKDPISRGNQMADRVAKQAAQGVNLLPAGKRTADGSEFEKRTADGSEFESPKKKAKVE

SEQ ID NO: 7514 - protein, 2090 aa, synthetic construct
MPAAKRVKLDGGDKKYSIGLDIGTNSVGWAVITDEYKVPSKKFKVLGNTDRHSIKKNLIGALLFDSGETAEATRLKRTARRRYTRRKNRICYLQEIFSNEMAKVDDSFFHRLEESFLVEEDKKHERHPIFGNIVDEVAYHEKYPTIYHLRKKLVDSTDKADLRLIYLALAHMIKFRGHFLIEGDLNPDNSDVDKLFIQLVQTYNQLFEENPINASGVDAKAILSARLSKSRRLENLIAQLPGEKKNGLFGNLIALSLGLTPNFKSNFDLAEDAKLQLSKDTYDDDLDNLLAQIGDQYADLFLAAKNLSDAILLSDILRVNTEITKAPLSASMIKRYDEHHQDLTLLKALVRQQLPEKYKEIFFDQSKNGYAGYIDGGASQEEFYKFIKPILEKMDGTEELLVKLNREDLLRKQRTFDNGSIPHQIHLGELHAILRRQEDFYPFLKDNREKIEKILTFRIPYYVGPLARGNSRFAWMTRKSEETITPWNFEEVVDKGASAQSFIERMTNFDKNLPNEKVLPKHSLLYEYFTVYNELTKVKYVTEGMRKPAFLSGEQKKAIVDLLFKTNRKVTVKQLKEDYFKKIECFDSVEISGVEDRFNASLGTYHDLLKIIKDKDFLDNEENEDILEDIVLTLTLFEDREMIEERLKTYAHLFDDKVMKQLKRRRYTGWGRLSRKLINGIRDKQSGKTILDFLKSDGFANRNFMQLIHDDSLTFKEDIQKAQVSGQGDSLHEHIANLAGSPAIKKGILQTVKVVDELVKVMGRHKPENIVIEMARENQTTQKGQKNSRERMKRIEEGIKELGSQILKEHPVENTQLQNEKLYLYYLQNGRDMYVDQELDINRLSDYDVDHIVPQSFLKDDSIDNKVLTRSDKARGKSDNVPSEEVVKKMKNYWRQLLNAKLITQRKFDNLTKAERGGLSELDKAGFIKRQLVETRQITKHVAQILDSRMNTKYDENDKLIREVKVITLKSKLVSDFRKDFQFYKVREINNYHHAHDAYLNAVVGTALIKKYPKLESEFVYGDYKVYDVRKMIAKSEQEIGKATAKYFFYSNIMNFFKTEITLANGEIRKRPLIETNGETGEIVWDKGRDFATVRKVLSMPQVNIVKKTEVQTGGFSKESILPKRNSDKLIARKKDWDPKKYGGFDSPTVAYSVLVVAKVEKGKSKKLKSVKELLGITIMERSSFEKNPIDFLEAKGYKEVKKDLIIKLPKYSLFELENGRKRMLASAGELQKGNELALPSKYVNFLYLASHYEKLKGSPEDNEQKQLFVEQHKHYLDEIIEQISEFSKRVILADANLDKVLSAYNKHRDKPIREQAENIIHLFTLTNLGAPAAFKYFDTTIDRKRYTSTKEVLDATLIHQSITGLYETRIDLSQLGGDGGEAAAKPAPGGGGGTLQLDDEYRLYSPLVKPDQNIQFWLEQFPQAWAETAGMGLAKQVPPQVIQLKASATPVSVRQYPLSKEAQEGIRPHVQRLIQQGILVPVQSPWNTPLLPVRKPGTNDYRPVQDLREVNKRVQDIHPTVPNPYNLLCALPPQRSWYTVLDLKDAFFCLRLHPTSQPLFAFEWRDPGTGRTGQLTWTRLPQGFKNSPTIFDEALHRDLANFRIQHPQVTLLQYVDDLLLAGATKQDCLEGTKALLLELSDLGYRASAKKAQICRREVTYLGYSLRDGQRWLTEARKKTVVQIPAPTTAKQVREFLGTAGFCRLWIPGFATLAAPLYPLTKEKGEFSWAPEHQKAFDAIKKALLSAPALALPDVTKPFTLYVDERKGVARGVLTQTLGPWRRPVAYLSKKLDPVASGWPVCLKAIAAVAILVKDADKLTLGQNITVIAPHALENIVRQPPDRWMTNARMTHYQSLLLTERVTFAPPAALNPATLLPEETDEPVTHDCHQLLIEETGVRKDLTDIPLTGEVLTWFTDGSSYVVEGKRMAGAAVVDGTRTIWASSLPEGTSAQKAELMALTQALRLAEGKSINIYTDSRYAFATAHVHGAIYKQRGLLTSAGREIKNKEEILSLLEALHLPKRLAIIHCPGHQKAKDPISRGNQMADRVAKQAAQGVNLLAGKRTADGSEFEKRTADGSEFESPKKKAKVE

SEQ ID NO: 7515 - protein, 2088 aa, synthetic construct; identical to SEQ ID NO: 7513

SEQ ID NO: 7516 - protein, 2176 aa, synthetic construct
MPAAKRVKLDGGDKKYSIGLDIGTNSVGWAVITDEYKVPSKKFKVLGNTDRHSIKKNLIGALLFDSGETAEATRLKRTARRRYTRRKNRICYLQEIFSNEMAKVDDSFFHRLEESFLVEEDKKHERHPIFGNIVDEVAYHEKYPTIYHLRKKLVDSTDKADLRLIYLALAHMIKFRGHFLIEGDLNPDNSDVDKLFIQLVQTYNQLFEENPINASGVDAKAILSARLSKSRRLENLIAQLPGEKKNGLFGNLIALSLGLTPNFKSNFDLAEDAKLQLSKDTYDDDLDNLLAQIGDQYADLFLAAKNLSDAILLSDILRVNTEITKAPLSASMIKRYDEHHQDLTLLKALVRQQLPEKYKEIFFDQSKNGYAGYIDGGASQEEFYKFIKPILEKMDGTEELLVKLNREDLLRKQRTFDNGSIPHQIHLGELHAILRRQEDFYPFLKDNREKIEKILTFRIPYYVGPLARGNSRFAWMTRKSEETITPWNFEEVVDKGASAQSFIERMTNFDKNLPNEKVLPKHSLLYEYFTVYNELTKVKYVTEGMRKPAFLSGEQKKAIVDLLFKTNRKVTVKQLKEDYFKKIECFDSVEISGVEDRFNASLGTYHDLLKIIKDKDFLDNEENEDILEDIVLTLTLFEDREMIEERLKTYAHLFDDKVMKQLKRRRYTGWGRLSRKLINGIRDKQSGKTILDFLKSDGFANRNFMQLIHDDSLTFKEDIQKAQVSGQGDSLHEHIANLAGSPAIKKGILQTVKVVDELVKVMGRHKPENIVIEMARENQTTQKGQKNSRERMKRIEEGIKELGSQILKEHPVENTQLQNEKLYLYYLQNGRDMYVDQELDINRLSDYDVDHIVPQSFLKDDSIDNKVLTRSDKARGKSDNVPSEEVVKKMKNYWRQLLNAKLITQRKFDNLTKAERGGLSELDKAGFIKRQLVETRQITKHVAQILDSRMNTKYDENDKLIREVKVITLKSKLVSDFRKDFQFYKVREINNYHHAHDAYLNAVVGTALIKKYPKLESEFVYGDYKVYDVRKMIAKSEQEIGKATAKYFFYSNIMNFFKTEITLANGEIRKRPLIETNGETGEIVWDKGRDFATVRKVLSMPQVNIVKKTEVQTGGFSKESILPKRNSDKLIARKKDWDPKKYGGFDSPTVAYSVLVVAKVEKGKSKKLKSVKELLGITIMERSSFEKNPIDFLEAKGYKEVKKDLIIKLPKYSLFELENGRKRMLASAGELQKGNELALPSKYVNFLYLASHYEKLKGSPEDNEQKQLFVEQHKHYLDEIIEQISEFSKRVILADANLDKVLSAYNKHRDKPIREQAENIIHLFTLTNLGAPAAFKYFDTTIDRKRYTSTKEVLDATLIHQSITGLYETRIDLSQLGGDGGEAAAKPAPGGGGGMDPLQLLQPLEAEIKGTKLKAHWNSGATITCVPEAFLEDERPIQTMLIKTIHGEKQQDVYYLTFKVQGRKVEAEVLASPYDYILLNPSDVPWLMKKPLQLTVLVPLHEYQERLLQQTALPKEQKELLQKLFLKYDALWQHWENQVGHRRIKPHNIATGTLAPRPQKQYPINPKAKPSIQIVIDDLLKQGVLIQQNSTMNTPVYPVPKPDGKWRMVLDYREVNKTIPLIAAQNQHSAGILSSIYRGKYKTTLDLTNGFWAHPITPESYWLTAFTWQGKQYCWTRLPQGFLNSPALFNADVVDLLKEIPNVQAYVDDIYISHDDPQEHLEQLEKIFSILLNAGYVVSLKKSEIAQREVEFLGFNITKEGRGLTDTFKQKLLNITPPKDLKQLQSILGKLNFARNFIPNYSELVKPLYTIVAPANGKFISWTEDNSNQLQHIISVLNQADNLEERNPETRLIIKVNSSPSAGYIRYYNEGSKRPIMYVNYIFSKAEAKFTQTEKLLTTMHKGLIKAMDLAMGQEILVYSPIVSMTKIQRTPLPERKALPVRWITWMTYLEDPRIQFHYDKSLPELQQIPNVTEDVIAKTKHPSEFAMVFYTDGSAIKHPDVNKSHSAGMGIAQVQFIPEYKIVHQWSIPLGDHTAQLAEIAAVEFACKKALKISGPVLIVTDSFYVAESANKELPYWKSNGFLNNKKKPLRHVSKWKSIAECLQLKPDIIIMHEKGHQQPMTTLHTEGNNLADKLATQGSYVVHAGKRTADGSEFEKRTADGSEFESPKKKAKVE

SEQ ID NO: 7517 - protein, 2176 aa, synthetic construct
MPAAKRVKLDGGDKKYSIGLDIGTNSVGWAVITDEYKVPSKKFKVLGNTDRHSIKKNLIGALLFDSGETAEATRLKRTARRRYTRRKNRICYLQEIFSNEMAKVDDSFFHRLEESFLVEEDKKHERHPIFGNIVDEVAYHEKYPTIYHLRKKLVDSTDKADLRLIYLALAHMIKFRGHFLIEGDLNPDNSDVDKLFIQLVQTYNQLFEENPINASGVDAKAILSARLSKSRRLENLIAQLPGEKKNGLFGNLIALSLGLTPNFKSNFDLAEDAKLQLSKDTYDDDLDNLLAQIGDQYADLFLAAKNLSDAILLSDILRVNTEITKAPLSASMIKRYDEHHQDLTLLKALVRQQLPEKYKEIFFDQSKNGYAGYIDGGASQEEFYKFIKPILEKMDGTEELLVKLNREDLLRKQRTFDNGSIPHQIHLGELHAILRRQEDFYPFLKDNREKIEKILTFRIPYYVGPLARGNSRFAWMTRKSEETITPWNFEEVVDKGASAQSFIERMTNFDKNLPNEKVLPKHSLLYEYFTVYNELTKVKYVTEGMRKPAFLSGEQKKAIVDLLFKTNRKVTVKQLKEDYFKKIECFDSVEISGVEDRFNASLGTYHDLLKIIKDKDFLDNEENEDILEDIVLTLTLFEDREMIEERLKTYAHLFDDKVMKQLKRRRYTGWGRLSRKLINGIRDKQSGKTILDFLKSDGFANRNFMQLIHDDSLTFKEDIQKAQVSGQGDSLHEHIANLAGSPAIKKGILQTVKVVDELVKVMGRHKPENIVIEMARENQTTQKGQKNSRERMKRIEEGIKELGSQILKEHPVENTQLQNEKLYLYYLQNGRDMYVDQELDINRLSDYDVDHIVPQSFLKDDSIDNKVLTRSDKARGKSDNVPSEEVVKKMKNYWRQLLNAKLITQRKFDNLTKAERGGLSELDKAGFIKRQLVETRQITKHVAQILDSRMNTKYDENDKLIREVKVITLKSKLVSDFRKDFQFYKVREINNYHHAHDAYLNAVVGTALIKKYPKLESEFVYGDYKVYDVRKMIAKSEQEIGKATAKYFFYSNIMNFFKTEITLANGEIRKRPLIETNGETGEIVWDKGRDFATVRKVLSMPQVNIVKKTEVQTGGFSKESILPKRNSDKLIARKKDWDPKKYGGFDSPTVAYSVLVVAKVEKGKSKKLKSVKELLGITIMERSSFEKNPIDFLEAKGYKEVKKDLIIKLPKYSLFELENGRKRMLASAGELQKGNELALPSKYVNFLYLASHYEKLKGSPEDNEQKQLFVEQHKHYLDEIIEQISEFSKRVILADANLDKVLSAYNKHRDKPIREQAENIIHLFTLTNLGAPAAFKYFDTTIDRKRYTSTKEVLDATLIHQSITGLYETRIDLSQLGGDGGEAAAKPAPGGGGGMDPLQLLQPLEAEIKGTKLKAHWNSGATITCVPQAFLEEEVPIKNIWIKTIHGEKEQPVYYLTFKIQGRKVEAEVISSPYDYILVSPSDIPWLMKKPLQLTTLVPLQEYEERLLKQTMLTGSYKEKLQSLFLKYDALWQHWENQVGHRRIKPHHIATGTVNPRPQKQYPINPKAKASIQTVINDLLKQGVLIQQNSIMNTPVYPVPKPDGKWRMVLDYREVNKTIPLIAAQNQHSAGILSSIFRGKYKTTLDLSNGFWAHSITPESYWLTAFTWLGQQYCWTRLPQGFLNSPALFTADVVDLLKEVPNVQVYVDDIYISHDDPREHLEQLEKVFSLLLNAGYVVSLKKSEIAQHEVEFLGFNITKEGRGLTETFKQKLLNITPPRDLKQLQSILGLLNFARNFIPNFSELVKPLYNIIATANGKYITWTTDNSQQLQNIISMLNSAENLEERNPEVRLIMKVNTSPSAGYIRFYNEFAKRPIMYLNYVYTKAEVKFTNTEKLLTTIHKGLIKALDLGMGQEILVYSPIVSMTKIQKTPLPERKALPIRWITWMSYLEDPRIQFHYDKTLPELQQVPTVTDDIIAKIKHPSEFSMVFYTDGSAIKHPNVNKSHNAGMGIAQVQFKPEFTVINTWSIPLGDHTAQLAEVAAVEFACKKALKIDGPVLIVTDSFYVAESVNKELPYWQSNGFFNNKKKPLKHVSKWKSIADCIQLKPDIIIIHEKGHQPTASTFHTEGNNLADKLATQGSYVVNAGKRTADGSEFEKRTADGSEFESPKKKAKVE

SEQ ID NO: 7518 - protein, 2087 aa, synthetic construct
MPAAKRVKLDGGDKKYSIGLDIGTNSVGWAVITDEYKVPSKKFKVLGNTDRHSIKKNLIGALLFDSGETAEATRLKRTARRRYTRRKNRICYLQEIFSNEMAKVDDSFFHRLEESFLVEEDKKHERHPIFGNIVDEVAYHEKYPTIYHLRKKLVDSTDKADLRLIYLALAHMIKFRGHFLIEGDLNPDNSDVDKLFIQLVQTYNQLFEENPINASGVDAKAILSARLSKSRRLENLIAQLPGEKKNGLFGNLIALSLGLTPNFKSNFDLAEDAKLQLSKDTYDDDLDNLLAQIGDQYADLFLAAKNLSDAILLSDILRVNTEITKAPLSASMIKRYDEHHQDLTLLKALVRQQLPEKYKEIFFDQSKNGYAGYIDGGASQEEFYKFIKPILEKMDGTEELLVKLNREDLLRKQRTFDNGSIPHQIHLGELHAILRRQEDFYPFLKDNREKIEKILTFRIPYYVGPLARGNSRFAWMTRKSEETITPWNFEEVVDKGASAQSFIERMTNFDKNLPNEKVLPKHSLLYEYFTVYNELTKVKYVTEGMRKPAFLSGEQKKAIVDLLFKTNRKVTVKQLKEDYFKKIECFDSVEISGVEDRFNASLGTYHDLLKIIKDKDFLDNEENEDILEDIVLTLTLFEDREMIEERLKTYAHLFDDKVMKQLKRRRYTGWGRLSRKLINGIRDKQSGKTILDFLKSDGFANRNFMQLIHDDSLTFKEDIQKAQVSGQGDSLHEHIANLAGSPAIKKGILQTVKVVDELVKVMGRHKPENIVIEMARENQTTQKGQKNSRERMKRIEEGIKELGSQILKEHPVENTQLQNEKLYLYYLQNGRDMYVDQELDINRLSDYDVDHIVPQSFLKDDSIDNKVLTRSDKARGKSDNVPSEEVVKKMKNYWRQLLNAKLITQRKFDNLTKAERGGLSELDKAGFIKRQLVETRQITKHVAQILDSRMNTKYDENDKLIREVKVITLKSKLVSDFRKDFQFYKVREINNYHHAHDAYLNAVVGTALIKKYPKLESEFVYGDYKVYDVRKMIAKSEQEIGKATAKYFFYSNIMNFFKTEITLANGEIRKRPLIETNGETGEIVWDKGRDFATVRKVLSMPQVNIVKKTEVQTGGFSKESILPKRNSDKLIARKKDWDPKKYGGFDSPTVAYSVLVVAKVEKGKSKKLKSVKELLGITIMERSSFEKNPIDFLEAKGYKEVKKDLIIKLPKYSLFELENGRKRMLASAGELQKGNELALPSKYVNFLYLASHYEKLKGSPEDNEQKQLFVEQHKHYLDEIIEQISEFSKRVILADANLDKVLSAYNKHRDKPIREQAENIIHLFTLTNLGAPAAFKYFDTTIDRKRYTSTKEVLDATLIHQSITGLYETRIDLSQLGGDGGEAAAKPAPGGGGGIPWLMKKPLQLTTLVPLQEYEERLLKQTMLTGSYKEKLQSLFLKYDALWQHWENQVGHRRIKPHHIATGTVNPRPQKQYPINPKAKASIQTVINDLLKQGVLIQQNSIMNTPVYPVPKPDGKWRMVLDYREVNKTIPLIAAQNQHSAGILSSIFRGKYKTTLDLSNGFWAHSITPESYWLTAFTWLGQQYCWTRLPQGFLNSPALFNADVVDLLKEVPNVQVYVDDIYISHDDPREHLEQLEKVFSLLLNAGYVVSLKKSEIAQHEVEFLGFNITKEGRGLTETFKQKLLNITPPRDLKQLQSILGLLNFARNFIPNFSELVKPLYNIIATAPGKYITWTTDNSQQLQNIISMLNSAENLEERNPEVRLIMKVNTSPSAGYIRFYNEFAKRPIMYLNYVYTKAEVKFTNTEKLLTTIHKGLIKALDLGMGQEILVYSPIVSMTKIQKTPLPERKALPIRWITWMSYLEDPRIQFHYDKTLPELQQVPTVTDDIIAKIKHPSEFSMVFYTDGSAIKHPNVNKSHNAGMGIAQVQFKPEFTVINTWSIPLGDHTAQLAEVAAVEFACKKALKIDGPVLIVTDSFYVAESVNKELPYWQSNGFFNNKKKPLKHVSKWKSIADCIQLKPDIIIIHEKGHQPTASTFHTEGNNLADKLATQGSYVVNAGKRTADGSEFEKRTADGSEFESPKKKAKVE

SEQ ID NO: 7519 - protein, 2176 aa, synthetic construct
MPAAKRVKLDGGDKKYSIGLDIGTNSVGWAVITDEYKVPSKKFKVLGNTDRHSIKKNLIGALLFDSGETAEATRLKRTARRRYTRRKNRICYLQEIFSNEMAKVDDSFFHRLEESFLVEEDKKHERHPIFGNIVDEVAYHEKYPTIYHLRKKLVDSTDKADLRLIYLALAHMIKFRGHFLIEGDLNPDNSDVDKLFIQLVQTYNQLFEENPINASGVDAKAILSARLSKSRRLENLIAQLPGEKKNGLFGNLIALSLGLTPNFKSNFDLAEDAKLQLSKDTYDDDLDNLLAQIGDQYADLFLAAKNLSDAILLSDILRVNTEITKAPLSASMIKRYDEHHQDLTLLKALVRQQLPEKYKEIFFDQSKNGYAGYIDGGASQEEFYKFIKPILEKMDGTEELLVKLNREDLLRKQRTFDNGSIPHQIHLGELHAILRRQEDFYPFLKDNREKIEKILTFRIPYYVGPLARGNSRFAWMTRKSEETITPWNFEEVVDKGASAQSFIERMTNFDKNLPNEKVLPKHSLLYEYFTVYNELTKVKYVTEGMRKPAFLSGEQKKAIVDLLFKTNRKVTVKQLKEDYFKKIECFDSVEISGVEDRFNASLGTYHDLLKIIKDKDFLDNEENEDILEDIVLTLTLFEDREMIEERLKTYAHLFDDKVMKQLKRRRYTGWGRLSRKLINGIRDKQSGKTILDFLKSDGFANRNFMQLIHDDSLTFKEDIQKAQVSGQGDSLHEHIANLAGSPAIKKGILQTVKVVDELVKVMGRHKPENIVIEMARENQTTQKGQKNSRERMKRIEEGIKELGSQILKEHPVENTQLQNEKLYLYYLQNGRDMYVDQELDINRLSDYDVDHIVPQSFLKDDSIDNKVLTRSDKARGKSDNVPSEEVVKKMKNYWRQLLNAKLITQRKFDNLTKAERGGLSELDKAGFIKRQLVETRQITKHVAQILDSRMNTKYDENDKLIREVKVITLKSKLVSDFRKDFQFYKVREINNYHHAHDAYLNAVVGTALIKKYPKLESEFVYGDYKVYDVRKMIAKSEQEIGKATAKYFFYSNIMNFFKTEITLANGEIRKRPLIETNGETGEIVWDKGRDFATVRKVLSMPQVNIVKKTEVQTGGFSKESILPKRNSDKLIARKKDWDPKKYGGFDSPTVAYSVLVVAKVEKGKSKKLKSVKELLGITIMERSSFEKNPIDFLEAKGYKEVKKDLIIKLPKYSLFELENGRKRMLASAGELQKGNELALPSKYVNFLYLASHYEKLKGSPEDNEQKQLFVEQHKHYLDEIIEQISEFSKRVILADANLDKVLSAYNKHRDKPIREQAENIIHLFTLTNLGAPAAFKYFDTTIDRKRYTSTKEVLDATLIHQSITGLYETRIDLSQLGGDGGEAAAKPAPGGGGGMDPLQLLQPLEAEIKGTKLKAHWNSGATITCVPQAFLEEEVPIKNIWIKTIHGEKEQPVYYLTFKIQGRKVEAEVISSPYDYILVSPSDIPWLMKKPLQLTTLVPLQEYEERLLKQTMLTGSYKEKLQSLFLKYDALWQHWENQVGHRRIKPHHIATGTVNPRPQKQYPINPKAKASIQTVINDLLKQGVLIQQNSIMNTPVYPVPKPDGKWRMVLDYREVNKTIPLIAAQNQHSAGILSSIFRGKYKTTLDLSNGFWAHSITPESYWLTAFTWLGQQYCWTRLPQGFLNSPALFNADVVDLLKEVPNVQVYVDDIYISHDDPREHLEQLEKVFSLLLNAGYVVSLKKSEIAQHEVEFLGFNITKEGRGLTETFKQKLLNITPPRDLKQLQSILGLLNFARNFIPNFSELVKPLYNIIATAPGKYITWTTDNSQQLQNIISMLNSAENLEERNPEVRLIMKVNTSPSAGYIRFYNEFAKRPIMYLNYVYTKAEVKFTNTEKLLTTIHKGLIKALDLGMGQEILVYSPIVSMTKIQKTPLPERKALPIRWITWMSYLEDPRIQFHYDKTLPELQQVPTVTDDIIAKIKHPSEFSMVFYTDGSAIKHPNVNKSHNAGMGIAQVQFKPEFTVINTWSIPLGDHTAQLAEVAAVEFACKKALKIDGPVLIVTDSFYVAESVNKELPYWQSNGFFNNKKKPLKHVSKWKSIADCIQLKPDIIIIHEKGHQPTASTFHTEGNNLADKLATQGSYVVNAGKRTADGSEFEKRTADGSEFESPKKKAKVE

SEQ ID NO: 7520 - protein, 2017 aa, synthetic construct
MPAAKRVKLDGGDKKYSIGLDIGTNSVGWAVITDEYKVPSKKFKVLGNTDRHSIKKNLIGALLFDSGETAEATRLKRTARRRYTRRKNRICYLQEIFSNEMAKVDDSFFHRLEESFLVEEDKKHERHPIFGNIVDEVAYHEKYPTIYHLRKKLVDSTDKADLRLIYLALAHMIKFRGHFLIEGDLNPDNSDVDKLFIQLVQTYNQLFEENPINASGVDAKAILSARLSKSRRLENLIAQLPGEKKNGLFGNLIALSLGLTPNFKSNFDLAEDAKLQLSKDTYDDDLDNLLAQIGDQYADLFLAAKNLSDAILLSDILRVNTEITKAPLSASMIKRYDEHHQDLTLLKALVRQQLPEKYKEIFFDQSKNGYAGYIDGGASQEEFYKFIKPILEKMDGTEELLVKLNREDLLRKQRTFDNGSIPHQIHLGELHAILRRQEDFYPFLKDNREKIEKILTFRIPYYVGPLARGNSRFAWMTRKSEETITPWNFEEVVDKGASAQSFIERMTNFDKNLPNEKVLPKHSLLYEYFTVYNELTKVKYVTEGMRKPAFLSGEQKKAIVDLLFKTNRKVTVKQLKEDYFKKIECFDSVEISGVEDRFNASLGTYHDLLKIIKDKDFLDNEENEDILEDIVLTLTLFEDREMIEERLKTYAHLFDDKVMKQLKRRRYTGWGRLSRKLINGIRDKQSGKTILDFLKSDGFANRNFMQLIHDDSLTFKEDIQKAQVSGQGDSLHEHIANLAGSPAIKKGILQTVKVVDELVKVMGRHKPENIVIEMARENQTTQKGQKNSRERMKRIEEGIKELGSQILKEHPVENTQLQNEKLYLYYLQNGRDMYVDQELDINRLSDYDVDHIVPQSFLKDDSIDNKVLTRSDKARGKSDNVPSEEVVKKMKNYWRQLLNAKLITQRKFDNLTKAERGGLSELDKAGFIKRQLVETRQITKHVAQILDSRMNTKYDENDKLIREVKVITLKSKLVSDFRKDFQFYKVREINNYHHAHDAYLNAVVGTALIKKYPKLESEFVYGDYKVYDVRKMIAKSEQEIGKATAKYFFYSNIMNFFKTEITLANGEIRKRPLIETNGETGEIVWDKGRDFATVRKVLSMPQVNIVKKTEVQTGGFSKESILPKRNSDKLIARKKDWDPKKYGGFDSPTVAYSVLVVAKVEKGKSKKLKSVKELLGITIMERSSFEKNPIDFLEAKGYKEVKKDLIIKLPKYSLFELENGRKRMLASAGELQKGNELALPSKYVNFLYLASHYEKLKGSPEDNEQKQLFVEQHKHYLDEIIEQISEFSKRVILADANLDKVLSAYNKHRDKPIREQAENIIHLFTLTNLGAPAAFKYFDTTIDRKRYTSTKEVLDATLIHQSITGLYETRIDLSQLGGDGGEAAAKPAPGGGGGPRSRAIDIPVPHADKISWKITDPVWVDQWPLTYEKTLAAIALVQEQLAAGHIEPTNSPWNTPIFIIKKKSGSWRLLQDLRAVNKVMVPMGALQPGLPSPVAPPLNYHKIVIDLKDCFFTIPLHPEDRPYFAFSVPQINFQSPMPRYQWKVLPQGMANSPTLCQKFVAAAIAPVRSQWPEAYILHYMDDILLACDSAEAAKACYAHIISCLTSYGLKIAPDKVQVSEPFSYLGFELHHQQVFTPRVCLKTDHLKTLNDFQKLLGDIQWLRPYLKLPTSALVPLNNILKPDPNPLSVRALTPEAKQSLALINKAIQNQSVQQISYNLPLVLLLLPTPHTPTAVFWQPNGTDPTKNGSPLLWLHLPASPSKVLLTYPSLLAMLIIKGRYTGRQLFGRDPHSIIIPYTQDQLTWLLQTSDEWAIALSSFTGDIDNHYPSDPVIQFAKLHQFIFPKITKCAPIPQATLVFTDGSSNGIAAYVIDNQPISIKSPYLSAQLVELYAILQVFTVLAHQPFNLYTDSAYIAQSVPLLETVPFIKSSTNATPLFSKLQQLILNRQHPFFIGHLRAHLNLPGPLAEGNALADAATQIFPIISDAGKRTADGSEFEKRTADGSEFESPKKKAKVE

SEQ ID NO: 7521 - protein, 2094 aa, synthetic construct
MPAAKRVKLDGGDKKYSIGLDIGTNSVGWAVITDEYKVPSKKFKVLGNTDRHSIKKNLIGALLFDSGETAEATRLKRTARRRYTRRKNRICYLQEIFSNEMAKVDDSFFHRLEESFLVEEDKKHERHPIFGNIVDEVAYHEKYPTIYHLRKKLVDSTDKADLRLIYLALAHMIKFRGHFLIEGDLNPDNSDVDKLFIQLVQTYNQLFEENPINASGVDAKAILSARLSKSRRLENLIAQLPGEKKNGLFGNLIALSLGLTPNFKSNFDLAEDAKLQLSKDTYDDDLDNLLAQIGDQYADLFLAAKNLSDAILLSDILRVNTEITKAPLSASMIKRYDEHHQDLTLLKALVRQQLPEKYKEIFFDQSKNGYAGYIDGGASQEEFYKFIKPILEKMDGTEELLVKLNREDLLRKQRTFDNGSIPHQIHLGELHAILRRQEDFYPFLKDNREKIEKILTFRIPYYVGPLARGNSRFAWMTRKSEETITPWNFEEVVDKGASAQSFIERMTNFDKNLPNEKVLPKHSLLYEYFTVYNELTKVKYVTEGMRKPAFLSGEQKKAIVDLLFKTNRKVTVKQLKEDYFKKIECFDSVEISGVEDRFNASLGTYHDLLKIIKDKDFLDNEENEDILEDIVLTLTLFEDREMIEERLKTYAHLFDDKVMKQLKRRRYTGWGRLSRKLINGIRDKQSGKTILDFLKSDGFANRNFMQLIHDDSLTFKEDIQKAQVSGQGDSLHEHIANLAGSPAIKKGILQTVKVVDELVKVMGRHKPENIVIEMARENQTTQKGQKNSRERMKRIEEGIKELGSQILKEHPVENTQLQNEKLYLYYLQNGRDMYVDQELDINRLSDYDVDHIVPQSFLKDDSIDNKVLTRSDKARGKSDNVPSEEVVKKMKNYWRQLLNAKLITQRKFDNLTKAERGGLSELDKAGFIKRQLVETRQITKHVAQILDSRMNTKYDENDKLIREVKVITLKSKLVSDFRKDFQFYKVREINNYHHAHDAYLNAVVGTALIKKYPKLESEFVYGDYKVYDVRKMIAKSEQEIGKATAKYFFYSNIMNFFKTEITLANGEIRKRPLIETNGETGEIVWDKGRDFATVRKVLSMPQVNIVKKTEVQTGGFSKESILPKRNSDKLIARKKDWDPKKYGGFDSPTVAYSVLVVAKVEKGKSKKLKSVKELLGITIMERSSFEKNPIDFLEAKGYKEVKKDLIIKLPKYSLFELENGRKRMLASAGELQKGNELALPSKYVNFLYLASHYEKLKGSPEDNEQKQLFVEQHKHYLDEIIEQISEFSKRVILADANLDKVLSAYNKHRDKPIREQAENIIHLFTLTNLGAPAAFKYFDTTIDRKRYTSTKEVLDATLIHQSITGLYETRIDLSQLGGDGGEAAAKPAPGGGGGVLNLEEEYRLHEKPVPSSIDPSWLQLFPTVWAERAGMGLANQVPPVVVELRSGASPVAVRQYPMSKEAREGIRPHIQRFLDLGVLVPCQSPWNTPLLPVKKPGTNDYRPVQDLREINKRVQDIHPTVPNPYNLLSSLPPSHTWYSVLDLKDAFFCLKLHPNSQPLFAFEWRDPEKGNTGQLTWTRLPQGFKNSPTLFNEALHRDLAPFRALNPQVVLLQYVDDLLVAAPTYRDCKEGTQKLLQELSKLGYRVSAKKAQLCQKEVTYLGYLLKEGKRWLTPARKATVMKIPPPTTPRQVREFLGKAGFCRLFIPGFASLAAPLYPLTKPSIPFIWTEEHQKAFDRIKEALLSAPALALPDLTKPFTLYVDERAGVARGVLTQTLGPWRRPVAYLSKKLDPVASGWPTCLKAVAAVALLLKDADKLTLGQNVTVIASHSLESIVRQPPDRWMTNARMTHYQSLLLNERVSFAPPAVLNPATLLPVESEATPVHRCSEILAEETGTRRDLKDQPLPGVPAWYTDGSSFIAEGKRRAGAAIVDGKRTVWASSLPEGTSAQKAELVALTQALRLAEGKDINIYTDSRYAFATAHIHGAIYKQRGWLTSAGKDIKNKEEILALLEAIHLPKRVAIIHCPGHQKGNDPVATGNRRADEAAKQAALSTRVLAETTKPAGKRTADGSEFEKRTADGSEFESPKKKAKVE

SEQ ID NO: 7522 - protein, 2096 aa, synthetic construct
MPAAKRVKLDGGDKKYSIGLDIGTNSVGWAVITDEYKVPSKKFKVLGNTDRHSIKKNLIGALLFDSGETAEATRLKRTARRRYTRRKNRICYLQEIFSNEMAKVDDSFFHRLEESFLVEEDKKHERHPIFGNIVDEVAYHEKYPTIYHLRKKLVDSTDKADLRLIYLALAHMIKFRGHFLIEGDLNPDNSDVDKLFIQLVQTYNQLFEENPINASGVDAKAILSARLSKSRRLENLIAQLPGEKKNGLFGNLIALSLGLTPNFKSNFDLAEDAKLQLSKDTYDDDLDNLLAQIGDQYADLFLAAKNLSDAILLSDILRVNTEITKAPLSASMIKRYDEHHQDLTLLKALVRQQLPEKYKEIFFDQSKNGYAGYIDGGASQEEFYKFIKPILEKMDGTEELLVKLNREDLLRKQRTFDNGSIPHQIHLGELHAILRRQEDFYPFLKDNREKIEKILTFRIPYYVGPLARGNSRFAWMTRKSEETITPWNFEEVVDKGASAQSFIERMTNFDKNLPNEKVLPKHSLLYEYFTVYNELTKVKYVTEGMRKPAFLSGEQKKAIVDLLFKTNRKVTVKQLKEDYFKKIECFDSVEISGVEDRFNASLGTYHDLLKIIKDKDFLDNEENEDILEDIVLTLTLFEDREMIEERLKTYAHLFDDKVMKQLKRRRYTGWGRLSRKLINGIRDKQSGKTILDFLKSDGFANRNFMQLIHDDSLTFKEDIQKAQVSGQGDSLHEHIANLAGSPAIKKGILQTVKVVDELVKVMGRHKPENIVIEMARENQTTQKGQKNSRERMKRIEEGIKELGSQILKEHPVENTQLQNEKLYLYYLQNGRDMYVDQELDINRLSDYDVDHIVPQSFLKDDSIDNKVLTRSDKARGKSDNVPSEEVVKKMKNYWRQLLNAKLITQRKFDNLTKAERGGLSELDKAGFIKRQLVETRQITKHVAQILDSRMNTKYDENDKLIREVKVITLKSKLVSDFRKDFQFYKVREINNYHHAHDAYLNAVVGTALIKKYPKLESEFVYGDYKVYDVRKMIAKSEQEIGKATAKYFFYSNIMNFFKTEITLANGEIRKRPLIETNGETGEIVWDKGRDFATVRKVLSMPQVNIVKKTEVQTGGFSKESILPKRNSDKLIARKKDWDPKKYGGFDSPTVAYSVLVVAKVEKGKSKKLKSVKELLGITIMERSSFEKNPIDFLEAKGYKEVKKDLIIKLPKYSLFELENGRKRMLASAGELQKGNELALPSKYVNFLYLASHYEKLKGSPEDNEQKQLFVEQHKHYLDEIIEQISEFSKRVILADANLDKVLSAYNKHRDKPIREQAENIIHLFTLTNLGAPAAFKYFDTTIDRKRYTSTKEVLDATLIHQSITGLYETRIDLSQLGGDGGEAAAKPAPGGGGGTLNIEDEYRLHETSKEPDVPLGSTWLSDFPQAWAETGGMGLAVRQAPLIIPLKATSTPVSIKQYPMSQEARLGIKPHIQRLLDQGILVPCQSPWNTPLLPVKKPGTNDYRPVQDLREVNKRVEDIHPTVPNPYNLLSGLPPSHQWYTVLDLKDAFFCLRLHPTSQPLFAFEWRDPEMGISGQLTWTRLPQGFKNSPTLFNEALHRDLADFRIQHPDLILLQYVDDLLLAATSEQDCQRGTRALLQTLGNLGYRASAKKAQICQKQVKYLGYLLKEGQRWLTEARKETVMGQPTPKTPRQLREFLGTAGFCRLWIPGFAEMAAPLYPLTKPGTLFNWGPDQQKAYQEIKQALLTAPALGLPDLTKPFELFVDEKQGYAKGVLTQKLGPWRRPVAYLSKKLDPVAAGWPPCLRMVAAIAVLTKDAGKLTMGQPLVILAPHAVEALVKQPPDRWLSNARMTHYQAMLLDTDRVQFGPVVALNPATLLPLPEKEAPHDCLEILAETHGTRPDLTDQPIPDADYTWYTDGSSFLQEGQRRAGAAVTTETEVIWARALPAGTSAQRAELIALTQALKMAEGKKLNVYTDSRYAFATAHVHGEIYRRRGWLTSEGREIKNKNEILALLKALFLPKRLSIIHCPGHQKGNSAEARGNRMADQAAREAAMKAVLETSTLLAGKRTADGSEFEKRTADGSEFESPKKKAKVE

SEQ ID NO: 7523 - protein, 2096 aa, synthetic construct
MPAAKRVKLDGGDKKYSIGLDIGTNSVGWAVITDEYKVPSKKFKVLGNTDRHSIKKNLIGALLFDSGETAEATRLKRTARRRYTRRKNRICYLQEIFSNEMAKVDDSFFHRLEESFLVEEDKKHERHPIFGNIVDEVAYHEKYPTIYHLRKKLVDSTDKADLRLIYLALAHMIKFRGHFLIEGDLNPDNSDVDKLFIQLVQTYNQLFEENPINASGVDAKAILSARLSKSRRLENLIAQLPGEKKNGLFGNLIALSLGLTPNFKSNFDLAEDAKLQLSKDTYDDDLDNLLAQIGDQYADLFLAAKNLSDAILLSDILRVNTEITKAPLSASMIKRYDEHHQDLTLLKALVRQQLPEKYKEIFFDQSKNGYAGYIDGGASQEEFYKFIKPILEKMDGTEELLVKLNREDLLRKQRTFDNGSIPHQIHLGELHAILRRQEDFYPFLKDNREKIEKILTFRIPYYVGPLARGNSRFAWMTRKSEETITPWNFEEVVDKGASAQSFIERMTNFDKNLPNEKVLPKHSLLYEYFTVYNELTKVKYVTEGMRKPAFLSGEQKKAIVDLLFKTNRKVTVKQLKEDYFKKIECFDSVEISGVEDRFNASLGTYHDLLKIIKDKDFLDNEENEDILEDIVLTLTLFEDREMIEERLKTYAHLFDDKVMKQLKRRRYTGWGRLSRKLINGIRDKQSGKTILDFLKSDGFANRNFMQLIHDDSLTFKEDIQKAQVSGQGDSLHEHIANLAGSPAIKKGILQTVKVVDELVKVMGRHKPENIVIEMARENQTTQKGQKNSRERMKRIEEGIKELGSQILKEHPVENTQLQNEKLYLYYLQNGRDMYVDQELDINRLSDYDVDHIVPQSFLKDDSIDNKVLTRSDKARGKSDNVPSEEVVKKMKNYWRQLLNAKLITQRKFDNLTKAERGGLSELDKAGFIKRQLVETRQITKHVAQILDSRMNTKYDENDKLIREVKVITLKSKLVSDFRKDFQFYKVREINNYHHAHDAYLNAVVGTALIKKYPKLESEFVYGDYKVYDVRKMIAKSEQEIGKATAKYFFYSNIMNFFKTEITLANGEIRKRPLIETNGETGEIVWDKGRDFATVRKVLSMPQVNIVKKTEVQTGGFSKESILPKRNSDKLIARKKDWDPKKYGGFDSPTVAYSVLVVAKVEKGKSKKLKSVKELLGITIMERSSFEKNPIDFLEAKGYKEVKKDLIIKLPKYSLFELENGRKRMLASAGELQKGNELALPSKYVNFLYLASHYEKLKGSPEDNEQKQLFVEQHKHYLDEIIEQISEFSKRVILADANLDKVLSAYNKHRDKPIREQAENIIHLFTLTNLGAPAAFKYFDTTIDRKRYTSTKEVLDATLIHQSITGLYETRIDLSQLGGDGGEAAAKPAPGGGGGTLNIEDEYRLHETSKEPDVPLGSTWLSDFPQAWAETGGMGLAVRQAPLIIPLKATSTPVSIKQYPMSQEARLGIKPHIQRLLDQGILVPCQSPWNTPLLPVKKPGTNDYRPVQDLREVNKRVEDIHPTVPNPYNLLSGLPPSHQWYTVLDLKDAFFCLRLHPTSQPLFAFEWRDPEMGISGQLTWTRLPQGFKNSPTLFNEALHRDLADFRIQHPDLILLQYVDDLLLAATSEQDCQRGTRALLQTLGNLGYRASAKKAQICQKQVKYLGYLLKEGQRWLTEARKETVMGQPTPKTPRQLREFLGKAGFCRLFIPGFAEMAAPLYPLTKPGTLFNWGPDQQKAYQEIKQALLTAPALGLPDLTKPFELFVDEKQGYAKGVLTQKLGPWRRPVAYLSKKLDPVAAGWPPCLRMVAAIAVLTKDAGKLTMGQPLVILAPHAVEALVKQPPDRWLSNARMTHYQAMLLDTDRVQFGPVVALNPATLLPLPEKEAPHDCLEILAETHGTRPDLTDQPIPDADYTWYTDGSSFLQEGQRRAGAAVTTETEVIWARALPAGTSAQRAELIALTQALKMAEGKKLNVYTDSRYAFATAHVHGEIYRRRGWLTSEGREIKNKNEILALLKALFLPKRLSIIHCPGHQKGNSAEARGNRMADQAAREAAMKAVLETSTLLAGKRTADGSEFEKRTADGSEFESPKKKAKVE

SEQ ID NO: 7524 - protein, 2098 aa, synthetic construct
MPAAKRVKLDGGDKKYSIGLDIGTNSVGWAVITDEYKVPSKKFKVLGNTDRHSIKKNLIGALLFDSGETAEATRLKRTARRRYTRRKNRICYLQEIFSNEMAKVDDSFFHRLEESFLVEEDKKHERHPIFGNIVDEVAYHEKYPTIYHLRKKLVDSTDKADLRLIYLALAHMIKFRGHFLIEGDLNPDNSDVDKLFIQLVQTYNQLFEENPINASGVDAKAILSARLSKSRRLENLIAQLPGEKKNGLFGNLIALSLGLTPNFKSNFDLAEDAKLQLSKDTYDDDLDNLLAQIGDQYADLFLAAKNLSDAILLSDILRVNTEITKAPLSASMIKRYDEHHQDLTLLKALVRQQLPEKYKEIFFDQSKNGYAGYIDGGASQEEFYKFIKPILEKMDGTEELLVKLNREDLLRKQRTFDNGSIPHQIHLGELHAILRRQEDFYPFLKDNREKIEKILTFRIPYYVGPLARGNSRFAWMTRKSEETITPWNFEEVVDKGASAQSFIERMTNFDKNLPNEKVLPKHSLLYEYFTVYNELTKVKYVTEGMRKPAFLSGEQKKAIVDLLFKTNRKVTVKQLKEDYFKKIECFDSVEISGVEDRFNASLGTYHDLLKIIKDKDFLDNEENEDILEDIVLTLTLFEDREMIEERLKTYAHLFDDKVMKQLKRRRYTGWGRLSRKLINGIRDKQSGKTILDFLKSDGFANRNFMQLIHDDSLTFKEDIQKAQVSGQGDSLHEHIANLAGSPAIKKGILQTVKVVDELVKVMGRHKPENIVIEMARENQTTQKGQKNSRERMKRIEEGIKELGSQILKEHPVENTQLQNEKLYLYYLQNGRDMYVDQELDINRLSDYDVDHIVPQSFLKDDSIDNKVLTRSDKARGKSDNVPSEEVVKKMKNYWRQLLNAKLITQRKFDNLTKAERGGLSELDKAGFIKRQLVETRQITKHVAQILDSRMNTKYDENDKLIREVKVITLKSKLVSDFRKDFQFYKVREINNYHHAHDAYLNAVVGTALIKKYPKLESEFVYGDYKVYDVRKMIAKSEQEIGKATAKYFFYSNIMNFFKTEITLANGEIRKRPLIETNGETGEIVWDKGRDFATVRKVLSMPQVNIVKKTEVQTGGFSKESILPKRNSDKLIARKKDWDPKKYGGFDSPTVAYSVLVVAKVEKGKSKKLKSVKELLGITIMERSSFEKNPIDFLEAKGYKEVKKDLIIKLPKYSLFELENGRKRMLASAGELQKGNELALPSKYVNFLYLASHYEKLKGSPEDNEQKQLFVEQHKHYLDEIIEQISEFSKRVILADANLDKVLSAYNKHRDKPIREQAENIIHLFTLTNLGAPAAFKYFDTTIDRKRYTSTKEVLDATLIHQSITGLYETRIDLSQLGGDGGPAPGGGEAAAKGGTAPLEEEYRLFLEAPIQNVTLLEQWKREIPKVWAEINPPGLASTQAPIHVQLLSTALPVRVRQYPITLEAKRSLRETIRKFRAAGILRPVHSPWNTPLLPVRKSGTSEYRMVQDLREVNKRVETIHPTVPNPYTLLSLLPPDRIWYSVLDLKDAFFCIPLAPESQLIFAFEWADAEEGESGQLTWTRLPQGFKNSPTLFDEALNRDLQGFRLDHPSVSLLQYVDDLLIAADTQAACLSATRDLLMTLAELGYRVSGKKAQLCQEEVTYLGFKIHKGSRSLSNSRTQAILQIPVPKTKRQVREFLGTIGYCRLWIPGFAELAQPLYAATRGGNDPLVWGEKEEEAFQSLKLALTQPPALALPSLDKPFQLFVEETSGAAKGVLTQALGPWKRPVAYLSKRLDPVAAGWPRCLRAIAAAALLTREASKLTFGQDIEITSSHNLESLLRSPPDKWLTNARITQYQVLLLDPPRVRFKQTAALNPATLLPETDDTLPIHHCLDTLDSLTSTRPDLTDQPLAQAEATLFTDGSSYIRDGKRYAGAAVVTLDSVIWAEPLPIGTSAQKAELIALTKALEWSKDKSVNIYTDSRYAFATLHVHGMIYRERGLLTAGGKAIKNAPEILALLTAVWLPKRVAVMHCKGHQKDDAPTSTGNRRADEVAREVAIRPLSTQATISAGKRTADGSEFEKRTADGSEFESPKKKAKVE

SEQ ID NO: 7525 - protein, 2098 aa, synthetic construct
MPAAKRVKLDGGDKKYSIGLDIGTNSVGWAVITDEYKVPSKKFKVLGNTDRHSIKKNLIGALLFDSGETAEATRLKRTARRRYTRRKNRICYLQEIFSNEMAKVDDSFFHRLEESFLVEEDKKHERHPIFGNIVDEVAYHEKYPTIYHLRKKLVDSTDKADLRLIYLALAHMIKFRGHFLIEGDLNPDNSDVDKLFIQLVQTYNQLFEENPINASGVDAKAILSARLSKSRRLENLIAQLPGEKKNGLFGNLIALSLGLTPNFKSNFDLAEDAKLQLSKDTYDDDLDNLLAQIGDQYADLFLAAKNLSDAILLSDILRVNTEITKAPLSASMIKRYDEHHQDLTLLKALVRQQLPEKYKEIFFDQSKNGYAGYIDGGASQEEFYKFIKPILEKMDGTEELLVKLNREDLLRKQRTFDNGSIPHQIHLGELHAILRRQEDFYPFLKDNREKIEKILTFRIPYYVGPLARGNSRFAWMTRKSEETITPWNFEEVVDKGASAQSFIERMTNFDKNLPNEKVLPKHSLLYEYFTVYNELTKVKYVTEGMRKPAFLSGEQKKAIVDLLFKTNRKVTVKQLKEDYFKKIECFDSVEISGVEDRFNASLGTYHDLLKIIKDKDFLDNEENEDILEDIVLTLTLFEDREMIEERLKTYAHLFDDKVMKQLKRRRYTGWGRLSRKLINGIRDKQSGKTILDFLKSDGFANRNFMQLIHDDSLTFKEDIQKAQVSGQGDSLHEHIANLAGSPAIKKGILQTVKVVDELVKVMGRHKPENIVIEMARENQTTQKGQKNSRERMKRIEEGIKELGSQILKEHPVENTQLQNEKLYLYYLQNGRDMYVDQELDINRLSDYDVDHIVPQSFLKDDSIDNKVLTRSDKARGKSDNVPSEEVVKKMKNYWRQLLNAKLITQRKFDNLTKAERGGLSELDKAGFIKRQLVETRQITKHVAQILDSRMNTKYDENDKLIREVKVITLKSKLVSDFRKDFQFYKVREINNYHHAHDAYLNAVVGTALIKKYPKLESEFVYGDYKVYDVRKMIAKSEQEIGKATAKYFFYSNIMNFFKTEITLANGEIRKRPLIETNGETGEIVWDKGRDFATVRKVLSMPQVNIVKKTEVQTGGFSKESILPKRNSDKLIARKKDWDPKKYGGFDSPTVAYSVLVVAKVEKGKSKKLKSVKELLGITIMERSSFEKNPIDFLEAKGYKEVKKDLIIKLPKYSLFELENGRKRMLASAGELQKGNELALPSKYVNFLYLASHYEKLKGSPEDNEQKQLFVEQHKHYLDEIIEQISEFSKRVILADANLDKVLSAYNKHRDKPIREQAENIIHLFTLTNLGAPAAFKYFDTTIDRKRYTSTKEVLDATLIHQSITGLYETRIDLSQLGGDGGPAPGGGEAAAKGGTAPLEEEYRLFLEAPIQNVTLLEQWKREIPKVWAEINPPGLASTQAPIHVQLLSTALPVRVRQYPITLEAKRSLRETIRKFRAAGILRPVHSPWNTPLLPVRKSGTSEYRMVQDLREVNKRVETIHPTVPNPYTLLSLLPPDRIWYSVLDLKDAFFCIPLAPESQLIFAFEWADAEEGESGQLTWTRLPQGFKNSPTLFNEALNRDLQGFRLDHPSVSLLQYVDDLLIAADTQAACLSATRDLLMTLAELGYRVSGKKAQLCQEEVTYLGFKIHKGSRSLSNSRTQAILQIPVPKTKRQVREFLGTIGYCRLWIPGFAELAQPLYAATRPGNDPLVWGEKEEEAFQSLKLALTQPPALALPSLDKPFQLFVEETSGAAKGVLTQALGPWKRPVAYLSKRLDPVAAGWPRCLRAIAAAALLTREASKLTFGQDIEITSSHNLESLLRSPPDKWLTNARITQYQVLLLDPPRVRFKQTAALNPATLLPETDDTLPIHHCLDTLDSLTSTRPDLTDQPLAQAEATLFTDGSSYIRDGKRYAGAAVVTLDSVIWAEPLPIGTSAQKAELIALTKALEWSKDKSVNIYTDSRYAFATLHVHGMIYRERGWLTAGGKAIKNAPEILALLTAVWLPKRVAVMHCKGHQKDDAPTSTGNRRADEVAREVAIRPLSTQATISAGKRTADGSEFEKRTADGSEFESPKKKAKVE

SEQ ID NO: 7526 - protein, 2098 aa, synthetic construct
MPAAKRVKLDGGDKKYSIGLDIGTNSVGWAVITDEYKVPSKKFKVLGNTDRHSIKKNLIGALLFDSGETAEATRLKRTARRRYTRRKNRICYLQEIFSNEMAKVDDSFFHRLEESFLVEEDKKHERHPIFGNIVDEVAYHEKYPTIYHLRKKLVDSTDKADLRLIYLALAHMIKFRGHFLIEGDLNPDNSDVDKLFIQLVQTYNQLFEENPINASGVDAKAILSARLSKSRRLENLIAQLPGEKKNGLFGNLIALSLGLTPNFKSNFDLAEDAKLQLSKDTYDDDLDNLLAQIGDQYADLFLAAKNLSDAILLSDILRVNTEITKAPLSASMIKRYDEHHQDLTLLKALVRQQLPEKYKEIFFDQSKNGYAGYIDGGASQEEFYKFIKPILEKMDGTEELLVKLNREDLLRKQRTFDNGSIPHQIHLGELHAILRRQEDFYPFLKDNREKIEKILTFRIPYYVGPLARGNSRFAWMTRKSEETITPWNFEEVVDKGASAQSFIERMTNFDKNLPNEKVLPKHSLLYEYFTVYNELTKVKYVTEGMRKPAFLSGEQKKAIVDLLFKTNRKVTVKQLKEDYFKKIECFDSVEISGVEDRFNASLGTYHDLLKIIKDKDFLDNEENEDILEDIVLTLTLFEDREMIEERLKTYAHLFDDKVMKQLKRRRYTGWGRLSRKLINGIRDKQSGKTILDFLKSDGFANRNFMQLIHDDSLTFKEDIQKAQVSGQGDSLHEHIANLAGSPAIKKGILQTVKVVDELVKVMGRHKPENIVIEMARENQTTQKGQKNSRERMKRIEEGIKELGSQILKEHPVENTQLQNEKLYLYYLQNGRDMYVDQELDINRLSDYDVDHIVPQSFLKDDSIDNKVLTRSDKARGKSDNVPSEEVVKKMKNYWRQLLNAKLITQRKFDNLTKAERGGLSELDKAGFIKRQLVETRQITKHVAQILDSRMNTKYDENDKLIREVKVITLKSKLVSDFRKDFQFYKVREINNYHHAHDAYLNAVVGTALIKKYPKLESEFVYGDYKVYDVRKMIAKSEQEIGKATAKYFFYSNIMNFFKTEITLANGEIRKRPLIETNGETGEIVWDKGRDFATVRKVLSMPQVNIVKKTEVQTGGFSKESILPKRNSDKLIARKKDWDPKKYGGFDSPTVAYSVLVVAKVEKGKSKKLKSVKELLGITIMERSSFEKNPIDFLEAKGYKEVKKDLIIKLPKYSLFELENGRKRMLASAGELQKGNELALPSKYVNFLYLASHYEKLKGSPEDNEQKQLFVEQHKHYLDEIIEQISEFSKRVILADANLDKVLSAYNKHRDKPIREQAENIIHLFTLTNLGAPAAFKYFDTTIDRKRYTSTKEVLDATLIHQSITGLYETRIDLSQLGGDGGPAPGGGEAAAKGGTAPLEEEYRLFLEAPIQNVTLLEQWKREIPKVWAEINPPGLASTQAPIHVQLLSTALPVRVRQYPITLEAKRSLRETIRKFRAAGILRPVHSPWNTPLLPVRKSGTSEYRMVQDLREVNKRVETIHPTVPNPYTLLSLLPPDRIWYSVLDLKDAFFCIPLAPESQLIFAFEWADAEEGESGQLTWTRLPQGFKNSPTLFNEALNRDLQGFRLDHPSVSLLQYVDDLLIAADTQAACLSATRDLLMTLAELGYRVSGKKAQLCQEEVTYLGFKIHKGSRSLSNSRTQAILQIPVPKTKRQVREFLGKIGYCRLFIPGFAELAQPLYAATRPGNDPLVWGEKEEEAFQSLKLALTQPPALALPSLDKPFQLFVEETSGAAKGVLTQALGPWKRPVAYLSKRLDPVAAGWPRCLRAIAAAALLTREASKLTFGQDIEITSSHNLESLLRSPPDKWLTNARITQYQVLLLDPPRVRFKQTAALNPATLLPETDDTLPIHHCLDTLDSLTSTRPDLTDQPLAQAEATLFTDGSSYIRDGKRYAGAAVVTLDSVIWAEPLPIGTSAQKAELIALTKALEWSKDKSVNIYTDSRYAFATLHVHGMIYRERGWLTAGGKAIKNAPEILALLTAVWLPKRVAVMHCKGHQKDDAPTSTGNRRADEVAREVAIRPLSTQATISAGKRTADGSEFEKRTADGSEFESPKKKAKVE

SEQ ID NO: 7527 - protein, 2173 aa, synthetic construct
MPAAKRVKLDGGDKKYSIGLDIGTNSVGWAVITDEYKVPSKKFKVLGNTDRHSIKKNLIGALLFDSGETAEATRLKRTARRRYTRRKNRICYLQEIFSNEMAKVDDSFFHRLEESFLVEEDKKHERHPIFGNIVDEVAYHEKYPTIYHLRKKLVDSTDKADLRLIYLALAHMIKFRGHFLIEGDLNPDNSDVDKLFIQLVQTYNQLFEENPINASGVDAKAILSARLSKSRRLENLIAQLPGEKKNGLFGNLIALSLGLTPNFKSNFDLAEDAKLQLSKDTYDDDLDNLLAQIGDQYADLFLAAKNLSDAILLSDILRVNTEITKAPLSASMIKRYDEHHQDLTLLKALVRQQLPEKYKEIFFDQSKNGYAGYIDGGASQEEFYKFIKPILEKMDGTEELLVKLNREDLLRKQRTFDNGSIPHQIHLGELHAILRRQEDFYPFLKDNREKIEKILTFRIPYYVGPLARGNSRFAWMTRKSEETITPWNFEEVVDKGASAQSFIERMTNFDKNLPNEKVLPKHSLLYEYFTVYNELTKVKYVTEGMRKPAFLSGEQKKAIVDLLFKTNRKVTVKQLKEDYFKKIECFDSVEISGVEDRFNASLGTYHDLLKIIKDKDFLDNEENEDILEDIVLTLTLFEDREMIEERLKTYAHLFDDKVMKQLKRRRYTGWGRLSRKLINGIRDKQSGKTILDFLKSDGFANRNFMQLIHDDSLTFKEDIQKAQVSGQGDSLHEHIANLAGSPAIKKGILQTVKVVDELVKVMGRHKPENIVIEMARENQTTQKGQKNSRERMKRIEEGIKELGSQILKEHPVENTQLQNEKLYLYYLQNGRDMYVDQELDINRLSDYDVDHIVPQSFLKDDSIDNKVLTRSDKARGKSDNVPSEEVVKKMKNYWRQLLNAKLITQRKFDNLTKAERGGLSELDKAGFIKRQLVETRQITKHVAQILDSRMNTKYDENDKLIREVKVITLKSKLVSDFRKDFQFYKVREINNYHHAHDAYLNAVVGTALIKKYPKLESEFVYGDYKVYDVRKMIAKSEQEIGKATAKYFFYSNIMNFFKTEITLANGEIRKRPLIETNGETGEIVWDKGRDFATVRKVLSMPQVNIVKKTEVQTGGFSKESILPKRNSDKLIARKKDWDPKKYGGFDSPTVAYSVLVVAKVEKGKSKKLKSVKELLGITIMERSSFEKNPIDFLEAKGYKEVKKDLIIKLPKYSLFELENGRKRMLASAGELQKGNELALPSKYVNFLYLASHYEKLKGSPEDNEQKQLFVEQHKHYLDEIIEQISEFSKRVILADANLDKVLSAYNKHRDKPIREQAENIIHLFTLTNLGAPAAFKYFDTTIDRKRYTSTKEVLDATLIHQSITGLYETRIDLSQLGGDGGPAPGGGEAAAKGGMDLLKPLTVERKGVKIKGYWNSQADITCVPKDLLQGEEPVRQQNVTTIHGTQEGDVYYVNLKIDGRRINTEVIGTTLDYAIITPGDVPWILKKPLELTIKLDLEEQQGTLLNNSILSKKGKEELKQLFEKYSALWQSWENQVGHRRIRPHKIATGTVKPTPQKQYHINPKAKPDIQIVINDLLKQGVLIQKESTMNTPVYPVPKPNGRWRMVLDYRAVNKVTPLIAVQNQHSYGILGSLFKGRYKTTIDLSNGFWAHPIVPEDYWITAFTWQGKQYCWTVLPQGFLNSPGLFTGDVVDLLQGIPNVEVYVDDVYISHDSEKEHLEYLDILFNRLKEAGYIISLKKSNIANSIVDFLGFQITNEGRGLTDTFKEKLENITAPTTLKQLQSILGLLNFARNFIPDFTELIAPLYALIPKSTKNYVPWQIEHSTTLETLITKLNGAEYLQGRKGDKTLIMKVNASYTTGYIRYYNEGEKKPISYVSIVFSKTELKFTELEKLLTTVHKGLLKALDLSMGQNIHVYSPIVSMQNIQKTPQTAKKALASRWLSWLSYLEDPRIRFFYDPQMPALKDLPAVDTGKDNKKHPSNFQHIFYTDGSAITSPTKEGHLNAGMGIVYFINKDGNLQKQQEWSISLGNHTAQFAEIAAFEFALKKCLPLGGNILVVTDSNYVAKAYNEELDVWASNGFVNNRKKPLKHISKWKSVADLKRLRPDVVVTHEPGHQKLDSSPHAYGNNLADQLATQASFKVHAGKRTADGSEFEKRTADGSEFESPKKKAKVE

SEQ ID NO: 7528 - protein, 2095 aa, synthetic construct
MPAAKRVKLDGGDKKYSIGLDIGTNSVGWAVITDEYKVPSKKFKVLGNTDRHSIKKNLIGALLFDSGETAEATRLKRTARRRYTRRKNRICYLQEIFSNEMAKVDDSFFHRLEESFLVEEDKKHERHPIFGNIVDEVAYHEKYPTIYHLRKKLVDSTDKADLRLIYLALAHMIKFRGHFLIEGDLNPDNSDVDKLFIQLVQTYNQLFEENPINASGVDAKAILSARLSKSRRLENLIAQLPGEKKNGLFGNLIALSLGLTPNFKSNFDLAEDAKLQLSKDTYDDDLDNLLAQIGDQYADLFLAAKNLSDAILLSDILRVNTEITKAPLSASMIKRYDEHHQDLTLLKALVRQQLPEKYKEIFFDQSKNGYAGYIDGGASQEEFYKFIKPILEKMDGTEELLVKLNREDLLRKQRTFDNGSIPHQIHLGELHAILRRQEDFYPFLKDNREKIEKILTFRIPYYVGPLARGNSRFAWMTRKSEETITPWNFEEVVDKGASAQSFIERMTNFDKNLPNEKVLPKHSLLYEYFTVYNELTKVKYVTEGMRKPAFLSGEQKKAIVDLLFKTNRKVTVKQLKEDYFKKIECFDSVEISGVEDRFNASLGTYHDLLKIIKDKDFLDNEENEDILEDIVLTLTLFEDREMIEERLKTYAHLFDDKVMKQLKRRRYTGWGRLSRKLINGIRDKQSGKTILDFLKSDGFANRNFMQLIHDDSLTFKEDIQKAQVSGQGDSLHEHIANLAGSPAIKKGILQTVKVVDELVKVMGRHKPENIVIEMARENQTTQKGQKNSRERMKRIEEGIKELGSQILKEHPVENTQLQNEKLYLYYLQNGRDMYVDQELDINRLSDYDVDHIVPQSFLKDDSIDNKVLTRSDKARGKSDNVPSEEVVKKMKNYWRQLLNAKLITQRKFDNLTKAERGGLSELDKAGFIKRQLVETRQITKHVAQILDSRMNTKYDENDKLIREVKVITLKSKLVSDFRKDFQFYKVREINNYHHAHDAYLNAVVGTALIKKYPKLESEFVYGDYKVYDVRKMIAKSEQEIGKATAKYFFYSNIMNFFKTEITLANGEIRKRPLIETNGETGEIVWDKGRDFATVRKVLSMPQVNIVKKTEVQTGGFSKESILPKRNSDKLIARKKDWDPKKYGGFDSPTVAYSVLVVAKVEKGKSKKLKSVKELLGITIMERSSFEKNPIDFLEAKGYKEVKKDLIIKLPKYSLFELENGRKRMLASAGELQKGNELALPSKYVNFLYLASHYEKLKGSPEDNEQKQLFVEQHKHYLDEIIEQISEFSKRVILADANLDKVLSAYNKHRDKPIREQAENIIHLFTLTNLGAPAAFKYFDTTIDRKRYTSTKEVLDATLIHQSITGLYETRIDLSQLGGDGGPAPGGGEAAAKGGTLQLEEEYRLFEPESTQKQEMDIWLKNFPQAWAETGGMGTAHCQAPVLIQLKATATPISIRQYPMPHEAYQGIKPHIRRMLDQGILKPCQSPWNTPLLPVKKPGTEDYRPVQDLREVNKRVEDIHPTVPNPYNLLSTLPPSHPWYTVLDLKDAFFCLRLHSESQLLFAFEWRDPEIGLSGQLTWTRLPQGFKNSPTLFNEALHSDLADFRVRYPALVLLQYVDDLLLAAATRTECLEGTKALLETLGNKGYRASAKKAQICLQEVTYLGYSLKDGQRWLTKARKEAILSIPVPKNSRQVREFLGTAGYCRLWIPGFAELAAPLYPLTRPGTLFQWGTEQQLAFEDIKKALLSSPALGLPDITKPFELFIDENSGFAKGVLVQKLGPWKRPVAYLSKKLDTVASGWPPCLRMVAAIAILVKDAGKLTLGQPLTILTSHPVEALVRQPPNKWLSNARMTHYQAMLLDAERVHFGPTVSLNPATLLPLPSGGNHHDCLQILAETHGTRPDLTDQPLPDADLTWYTDGSSFIRNGEREAGAAVTTESEVIWAAPLPPGTSAQRAELIALTQALKMAEGKKLTVYTDSRYAFATTHVHGEIYRRRGWLTSEGKEIKNKNEILALLEALFLPKRLSIIHCPGHQKGDSPQAKGNRLADDTAKKAATETHSSLTVLPAGKRTADGSEFEKRTADGSEFESPKKKAKVE

SEQ ID NO: 7529 - protein, 2094 aa, synthetic construct
MPAAKRVKLDGGDKKYSIGLDIGTNSVGWAVITDEYKVPSKKFKVLGNTDRHSIKKNLIGALLFDSGETAEATRLKRTARRRYTRRKNRICYLQEIFSNEMAKVDDSFFHRLEESFLVEEDKKHERHPIFGNIVDEVAYHEKYPTIYHLRKKLVDSTDKADLRLIYLALAHMIKFRGHFLIEGDLNPDNSDVDKLFIQLVQTYNQLFEENPINASGVDAKAILSARLSKSRRLENLIAQLPGEKKNGLFGNLIALSLGLTPNFKSNFDLAEDAKLQLSKDTYDDDLDNLLAQIGDQYADLFLAAKNLSDAILLSDILRVNTEITKAPLSASMIKRYDEHHQDLTLLKALVRQQLPEKYKEIFFDQSKNGYAGYIDGGASQEEFYKFIKPILEKMDGTEELLVKLNREDLLRKQRTFDNGSIPHQIHLGELHAILRRQEDFYPFLKDNREKIEKILTFRIPYYVGPLARGNSRFAWMTRKSEETITPWNFEEVVDKGASAQSFIERMTNFDKNLPNEKVLPKHSLLYEYFTVYNELTKVKYVTEGMRKPAFLSGEQKKAIVDLLFKTNRKVTVKQLKEDYFKKIECFDSVEISGVEDRFNASLGTYHDLLKIIKDKDFLDNEENEDILEDIVLTLTLFEDREMIEERLKTYAHLFDDKVMKQLKRRRYTGWGRLSRKLINGIRDKQSGKTILDFLKSDGFANRNFMQLIHDDSLTFKEDIQKAQVSGQGDSLHEHIANLAGSPAIKKGILQTVKVVDELVKVMGRHKPENIVIEMARENQTTQKGQKNSRERMKRIEEGIKELGSQILKEHPVENTQLQNEKLYLYYLQNGRDMYVDQELDINRLSDYDVDHIVPQSFLKDDSIDNKVLTRSDKARGKSDNVPSEEVVKKMKNYWRQLLNAKLITQRKFDNLTKAERGGLSELDKAGFIKRQLVETRQITKHVAQILDSRMNTKYDENDKLIREVKVITLKSKLVSDFRKDFQFYKVREINNYHHAHDAYLNAVVGTALIKKYPKLESEFVYGDYKVYDVRKMIAKSEQEIGKATAKYFFYSNIMNFFKTEITLANGEIRKRPLIETNGETGEIVWDKGRDFATVRKVLSMPQVNIVKKTEVQTGGFSKESILPKRNSDKLIARKKDWDPKKYGGFDSPTVAYSVLVVAKVEKGKSKKLKSVKELLGITIMERSSFEKNPIDFLEAKGYKEVKKDLIIKLPKYSLFELENGRKRMLASAGELQKGNELALPSKYVNFLYLASHYEKLKGSPEDNEQKQLFVEQHKHYLDEIIEQISEFSKRVILADANLDKVLSAYNKHRDKPIREQAENIIHLFTLTNLGAPAAFKYFDTTIDRKRYTSTKEVLDATLIHQSITGLYETRIDLSQLGGDGGPAPGGGEAAAKGGVLNLEEEYRLHEKPVPSSIDPSWLQLFPTVWAERAGMGLANQVPPVVVELRSGASPVAVRQYPMSKEAREGIRPHIQKFLDLGVLVPCRSPWNTPLLPVKKPGTNDYRPVQDLREINKRVQDIHPTVPNPYNLLSSLPPSYTWYSVLDLKDAFFCLRLHPNSQPLFAFEWKDPEKGNTGQLTWTRLPQGFKNSPTLFNEALHRDLAPFRALNPQVVLLQYVDDLLVAAPTYEDCKKGTQKLLQELSKLGYRVSAKKAQLCQREVTYLGYLLKEGKRWLTPARKATVMKIPVPTTPRQVREFLGTAGFCRLWIPGFASLAAPLYPLTKPSIPFIWTEEHQQAFDHIKKALLSAPALALPDLTKPFTLYIDERAGVARGVLTQTLGPWRRPVAYLSKKLDPVASGWPTCLKAVAAVALLLKDADKLTLGQNVTVIASHSLESIVRQPPDRWMTNARMTHYQSLLLNERVSFAPPAVLNPATLLPVESEATPVHRCSEILAEETGTRRDLEDQPLPGVPTWYTDGSSFITEGKRRAGAPIVDGKRTVWASSLPEGTSAQKAELVALTQALRLAEGKNINIYTDSRYAFATAHIHGAIYKQRGWLTSAGKDIKNKEEILALLEAIHLPRRVAIIHCPGHQRGSNPVATGNRRADEAAKQAALSTRVLAGTTKPAGKRTADGSEFEKRTADGSEFESPKKKAKVE

SEQ ID NO: 7530 - protein, 2127 aa, synthetic construct
MPAAKRVKLDGGDKKYSIGLDIGTNSVGWAVITDEYKVPSKKFKVLGNTDRHSIKKNLIGALLFDSGETAEATRLKRTARRRYTRRKNRICYLQEIFSNEMAKVDDSFFHRLEESFLVEEDKKHERHPIFGNIVDEVAYHEKYPTIYHLRKKLVDSTDKADLRLIYLALAHMIKFRGHFLIEGDLNPDNSDVDKLFIQLVQTYNQLFEENPINASGVDAKAILSARLSKSRRLENLIAQLPGEKKNGLFGNLIALSLGLTPNFKSNFDLAEDAKLQLSKDTYDDDLDNLLAQIGDQYADLFLAAKNLSDAILLSDILRVNTEITKAPLSASMIKRYDEHHQDLTLLKALVRQQLPEKYKEIFFDQSKNGYAGYIDGGASQEEFYKFIKPILEKMDGTEELLVKLNREDLLRKQRTFDNGSIPHQIHLGELHAILRRQEDFYPFLKDNREKIEKILTFRIPYYVGPLARGNSRFAWMTRKSEETITPWNFEEVVDKGASAQSFIERMTNFDKNLPNEKVLPKHSLLYEYFTVYNELTKVKYVTEGMRKPAFLSGEQKKAIVDLLFKTNRKVTVKQLKEDYFKKIECFDSVEISGVEDRFNASLGTYHDLLKIIKDKDFLDNEENEDILEDIVLTLTLFEDREMIEERLKTYAHLFDDKVMKQLKRRRYTGWGRLSRKLINGIRDKQSGKTILDFLKSDGFANRNFMQLIHDDSLTFKEDIQKAQVSGQGDSLHEHIANLAGSPAIKKGILQTVKVVDELVKVMGRHKPENIVIEMARENQTTQKGQKNSRERMKRIEEGIKELGSQILKEHPVENTQLQNEKLYLYYLQNGRDMYVDQELDINRLSDYDVDHIVPQSFLKDDSIDNKVLTRSDKARGKSDNVPSEEVVKKMKNYWRQLLNAKLITQRKFDNLTKAERGGLSELDKAGFIKRQLVETRQITKHVAQILDSRMNTKYDENDKLIREVKVITLKSKLVSDFRKDFQFYKVREINNYHHAHDAYLNAVVGTALIKKYPKLESEFVYGDYKVYDVRKMIAKSEQEIGKATAKYFFYSNIMNFFKTEITLANGEIRKRPLIETNGETGEIVWDKGRDFATVRKVLSMPQVNIVKKTEVQTGGFSKESILPKRNSDKLIARKKDWDPKKYGGFDSPTVAYSVLVVAKVEKGKSKKLKSVKELLGITIMERSSFEKNPIDFLEAKGYKEVKKDLIIKLPKYSLFELENGRKRMLASAGELQKGNELALPSKYVNFLYLASHYEKLKGSPEDNEQKQLFVEQHKHYLDEIIEQISEFSKRVILADANLDKVLSAYNKHRDKPIREQAENIIHLFTLTNLGAPAAFKYFDTTIDRKRYTSTKEVLDATLIHQSITGLYETRIDLSQLGGDGGPAPGGGEAAAKGGLLGRDLLTKLKAQIQFSTEGPQVTWEDRPAMCLVLNLEEEYRLHEKPVPPSIDPSWLQLFPMVWAEKAGMGLANQVPPVVVELKSDASPVAVRQYPMSKEAREGIRPHIQRFLDLGILVPCQSPWNTPLLPVKKPGTNDYRPVQDLREVNKRVQDIHPTVPNPYNLLSSLPPSHTWYSVLDLKDAFFCLKLHPNSQPLFAFEWRDPEKGNTGQLTWTRLPQGFKNSPTLFNEALHRDLASFRALNPQVVMLQYVDDLLVAAPTYRDCKEGTRRLLQELSKLGYRVSAKKAQLCREEVTYLGYLLKGGKRWLTPARKATVMKIPTPTTPRQVREFLGTAGFCRLWIPGFASLAAPLYPLTRPKVPFTWTEAHQEAFGRIKEALLSAPALALPDLTKPFALYVDEKEGVARGVLTQTLGPWRRPVAYLSKKLDPVASGWPTCLKAIAAVALLLKDADKLTLGQNVLVIAPHNLESIVRQPPDRWMTNARMTHYQSLLLNERVSFAPPAILNPATLLPVESDDTPIHICSEILAEETGTRPDLRDQPLPGVPAWYTDGSSFIMDGRRQAGAAIVDNKRTVWASNLPEGTSAQKAELIALTQALRLAEGKSINIYTDSRYAFATAHVHGAIYKQRGWLTSAGKDIKNKEEILALLEAIHLPKRVAIIHCPGHQRGTDPVATGNRKADEAAKQAAQSTRILTETTKNAGKRTADGSEFEKRTADGSEFESPKKKAKVE

SEQ ID NO: 7531 - protein, 2127 aa, synthetic construct
MPAAKRVKLDGGDKKYSIGLDIGTNSVGWAVITDEYKVPSKKFKVLGNTDRHSIKKNLIGALLFDSGETAEATRLKRTARRRYTRRKNRICYLQEIFSNEMAKVDDSFFHRLEESFLVEEDKKHERHPIFGNIVDEVAYHEKYPTIYHLRKKLVDSTDKADLRLIYLALAHMIKFRGHFLIEGDLNPDNSDVDKLFIQLVQTYNQLFEENPINASGVDAKAILSARLSKSRRLENLIAQLPGEKKNGLFGNLIALSLGLTPNFKSNFDLAEDAKLQLSKDTYDDDLDNLLAQIGDQYADLFLAAKNLSDAILLSDILRVNTEITKAPLSASMIKRYDEHHQDLTLLKALVRQQLPEKYKEIFFDQSKNGYAGYIDGGASQEEFYKFIKPILEKMDGTEELLVKLNREDLLRKQRTFDNGSIPHQIHLGELHAILRRQEDFYPFLKDNREKIEKILTFRIPYYVGPLARGNSRFAWMTRKSEETITPWNFEEVVDKGASAQSFIERMTNFDKNLPNEKVLPKHSLLYEYFTVYNELTKVKYVTEGMRKPAFLSGEQKKAIVDLLFKTNRKVTVKQLKEDYFKKIECFDSVEISGVEDRFNASLGTYHDLLKIIKDKDFLDNEENEDILEDIVLTLTLFEDREMIEERLKTYAHLFDDKVMKQLKRRRYTGWGRLSRKLINGIRDKQSGKTILDFLKSDGFANRNFMQLIHDDSLTFKEDIQKAQVSGQGDSLHEHIANLAGSPAIKKGILQTVKVVDELVKVMGRHKPENIVIEMARENQTTQKGQKNSRERMKRIEEGIKELGSQILKEHPVENTQLQNEKLYLYYLQNGRDMYVDQELDINRLSDYDVDHIVPQSFLKDDSIDNKVLTRSDKARGKSDNVPSEEVVKKMKNYWRQLLNAKLITQRKFDNLTKAERGGLSELDKAGFIKRQLVETRQITKHVAQILDSRMNTKYDENDKLIREVKVITLKSKLVSDFRKDFQFYKVREINNYHHAHDAYLNAVVGTALIKKYPKLESEFVYGDYKVYDVRKMIAKSEQEIGKATAKYFFYSNIMNFFKTEITLANGEIRKRPLIETNGETGEIVWDKGRDFATVRKVLSMPQVNIVKKTEVQTGGFSKESILPKRNSDKLIARKKDWDPKKYGGFDSPTVAYSVLVVAKVEKGKSKKLKSVKELLGITIMERSSFEKNPIDFLEAKGYKEVKKDLIIKLPKYSLFELENGRKRMLASAGELQKGNELALPSKYVNFLYLASHYEKLKGSPEDNEQKQLFVEQHKHYLDEIIEQISEFSKRVILADANLDKVLSAYNKHRDKPIREQAENIIHLFTLTNLGAPAAFKYFDTTIDRKRYTSTKEVLDATLIHQSITGLYETRIDLSQLGGDGGPAPGGGEAAAKGGLLGRDLLTKLKAQIQFSTEGPQVTWEDRPAMCLVLNLEEEYRLHEKPVPPSIDPSWLQLFPMVWAEKAGMGLANQVPPVVVELKSDASPVAVRQYPMSKEAREGIRPHIQRFLDLGILVPCQSPWNTPLLPVKKPGTNDYRPVQDLREVNKRVQDIHPTVPNPYNLLSSLPPSHTWYSVLDLKDAFFCLKLHPNSQPLFAFEWRDPEKGNTGQLTWTRLPQGFKNSPTLFNEALHRDLASFRALNPQVVMLQYVDDLLVAAPTYRDCKEGTRRLLQELSKLGYRVSAKKAQLCREEVTYLGYLLKGGKRWLTPARKATVMKIPTPTTPRQVREFLGKAGFCRLFIPGFASLAAPLYPLTRPKVPFTWTEAHQEAFGRIKEALLSAPALALPDLTKPFALYVDEKEGVARGVLTQTLGPWRRPVAYLSKKLDPVASGWPTCLKAIAAVALLLKDADKLTLGQNVLVIAPHNLESIVRQPPDRWMTNARMTHYQSLLLNERVSFAPPAILNPATLLPVESDDTPIHICSEILAEETGTRPDLRDQPLPGVPAWYTDGSSFIMDGRRQAGAAIVDNKRTVWASNLPEGTSAQKAELIALTQALRLAEGKSINIYTDSRYAFATAHVHGAIYKQRGWLTSAGKDIKNKEEILALLEAIHLPKRVAIIHCPGHQRGTDPVATGNRKADEAAKQAAQSTRILTETTKNAGKRTADGSEFEKRTADGSEFESPKKKAKVE

SEQ ID NO: 7532 - protein, 2218 aa, synthetic construct
MPAAKRVKLDGGDKKYSIGLDIGTNSVGWAVITDEYKVPSKKFKVLGNTDRHSIKKNLIGALLFDSGETAEATRLKRTARRRYTRRKNRICYLQEIFSNEMAKVDDSFFHRLEESFLVEEDKKHERHPIFGNIVDEVAYHEKYPTIYHLRKKLVDSTDKADLRLIYLALAHMIKFRGHFLIEGDLNPDNSDVDKLFIQLVQTYNQLFEENPINASGVDAKAILSARLSKSRRLENLIAQLPGEKKNGLFGNLIALSLGLTPNFKSNFDLAEDAKLQLSKDTYDDDLDNLLAQIGDQYADLFLAAKNLSDAILLSDILRVNTEITKAPLSASMIKRYDEHHQDLTLLKALVRQQLPEKYKEIFFDQSKNGYAGYIDGGASQEEFYKFIKPILEKMDGTEELLVKLNREDLLRKQRTFDNGSIPHQIHLGELHAILRRQEDFYPFLKDNREKIEKILTFRIPYYVGPLARGNSRFAWMTRKSEETITPWNFEEVVDKGASAQSFIERMTNFDKNLPNEKVLPKHSLLYEYFTVYNELTKVKYVTEGMRKPAFLSGEQKKAIVDLLFKTNRKVTVKQLKEDYFKKIECFDSVEISGVEDRFNASLGTYHDLLKIIKDKDFLDNEENEDILEDIVLTLTLFEDREMIEERLKTYAHLFDDKVMKQLKRRRYTGWGRLSRKLINGIRDKQSGKTILDFLKSDGFANRNFMQLIHDDSLTFKEDIQKAQVSGQGDSLHEHIANLAGSPAIKKGILQTVKVVDELVKVMGRHKPENIVIEMARENQTTQKGQKNSRERMKRIEEGIKELGSQILKEHPVENTQLQNEKLYLYYLQNGRDMYVDQELDINRLSDYDVDHIVPQSFLKDDSIDNKVLTRSDKARGKSDNVPSEEVVKKMKNYWRQLLNAKLITQRKFDNLTKAERGGLSELDKAGFIKRQLVETRQITKHVAQILDSRMNTKYDENDKLIREVKVITLKSKLVSDFRKDFQFYKVREINNYHHAHDAYLNAVVGTALIKKYPKLESEFVYGDYKVYDVRKMIAKSEQEIGKATAKYFFYSNIMNFFKTEITLANGEIRKRPLIETNGETGEIVWDKGRDFATVRKVLSMPQVNIVKKTEVQTGGFSKESILPKRNSDKLIARKKDWDPKKYGGFDSPTVAYSVLVVAKVEKGKSKKLKSVKELLGITIMERSSFEKNPIDFLEAKGYKEVKKDLIIKLPKYSLFELENGRKRMLASAGELQKGNELALPSKYVNFLYLASHYEKLKGSPEDNEQKQLFVEQHKHYLDEIIEQISEFSKRVILADANLDKVLSAYNKHRDKPIREQAENIIHLFTLTNLGAPAAFKYFDTTIDRKRYTSTKEVLDATLIHQSITGLYETRIDLSQLGGDGGPAPGGGEAAAKGGTLGDQGSRGSDPLPEPRVTLTVEGIPTEFLVNTGAEHSVLTKPMGKMGSKRTVVAGATGSKVYPWTTKRLLKIGQKQVTHSFLVIPECPAPLLGRDLLTKLKAQIQFSTEGPQVTWEDRPAMCLVLNLEEEYRLHEKPVPPSIDPSWLQLFPMVWAEKAGMGLANQVPPVVVELKSDASPVAVRQYPMSKEAREGIRPHIQRFLDLGILVPCQSPWNTPLLPVKKPGTNDYRPVQDLREVNKRVQDIHPTVPNPYNLLSSLPPSHTWYSVLDLKDAFFCLKLHPNSQPLFAFEWRDPEKGNTGQLTWTRLPQGFKNSPTLFNEALHRDLASFRALNPQVVMLQYVDDLLVAAPTYRDCKEGTRRLLQELSKLGYRVSAKKAQLCREEVTYLGYLLKGGKRWLTPARKATVMKIPTPTTPRQVREFLGTAGFCRLWIPGFASLAAPLYPLTRPKVPFTWTEAHQEAFGRIKEALLSAPALALPDLTKPFALYVDEKEGVARGVLTQTLGPWRRPVAYLSKKLDPVASGWPTCLKAIAAVALLLKDADKLTLGQNVLVIAPHNLESIVRQPPDRWMTNARMTHYQSLLLNERVSFAPPAILNPATLLPVESDDTPIHICSEILAEETGTRPDLRDQPLPGVPAWYTDGSSFIMDGRRQAGAAIVDNKRTVWASNLPEGTSAQKAELIALTQALRLAEGKSINIYTDSRYAFATAHVHGAIYKQRGWLTSAGKDIKNKEEILALLEAIHLPKRVAIIHCPGHQRGTDPVATGNRKADEAAKQAAQSTRILTETTKNAGKRTADGSEFEKRTADGSEFESPKKKAKVE

SEQ ID NO: 7533 - protein, 2218 aa, synthetic construct
MPAAKRVKLDGGDKKYSIGLDIGTNSVGWAVITDEYKVPSKKFKVLGNTDRHSIKKNLIGALLFDSGETAEATRLKRTARRRYTRRKNRICYLQEIFSNEMAKVDDSFFHRLEESFLVEEDKKHERHPIFGNIVDEVAYHEKYPTIYHLRKKLVDSTDKADLRLIYLALAHMIKFRGHFLIEGDLNPDNSDVDKLFIQLVQTYNQLFEENPINASGVDAKAILSARLSKSRRLENLIAQLPGEKKNGLFGNLIALSLGLTPNFKSNFDLAEDAKLQLSKDTYDDDLDNLLAQIGDQYADLFLAAKNLSDAILLSDILRVNTEITKAPLSASMIKRYDEHHQDLTLLKALVRQQLPEKYKEIFFDQSKNGYAGYIDGGASQEEFYKFIKPILEKMDGTEELLVKLNREDLLRKQRTFDNGSIPHQIHLGELHAILRRQEDFYPFLKDNREKIEKILTFRIPYYVGPLARGNSRFAWMTRKSEETITPWNFEEVVDKGASAQSFIERMTNFDKNLPNEKVLPKHSLLYEYFTVYNELTKVKYVTEGMRKPAFLSGEQKKAIVDLLFKTNRKVTVKQLKEDYFKKIECFDSVEISGVEDRFNASLGTYHDLLKIIKDKDFLDNEENEDILEDIVLTLTLFEDREMIEERLKTYAHLFDDKVMKQLKRRRYTGWGRLSRKLINGIRDKQSGKTILDFLKSDGFANRNFMQLIHDDSLTFKEDIQKAQVSGQGDSLHEHIANLAGSPAIKKGILQTVKVVDELVKVMGRHKPENIVIEMARENQTTQKGQKNSRERMKRIEEGIKELGSQILKEHPVENTQLQNEKLYLYYLQNGRDMYVDQELDINRLSDYDVDHIVPQSFLKDDSIDNKVLTRSDKARGKSDNVPSEEVVKKMKNYWRQLLNAKLITQRKFDNLTKAERGGLSELDKAGFIKRQLVETRQITKHVAQILDSRMNTKYDENDKLIREVKVITLKSKLVSDFRKDFQFYKVREINNYHHAHDAYLNAVVGTALIKKYPKLESEFVYGDYKVYDVRKMIAKSEQEIGKATAKYFFYSNIMNFFKTEITLANGEIRKRPLIETNGETGEIVWDKGRDFATVRKVLSMPQVNIVKKTEVQTGGFSKESILPKRNSDKLIARKKDWDPKKYGGFDSPTVAYSVLVVAKVEKGKSKKLKSVKELLGITIMERSSFEKNPIDFLEAKGYKEVKKDLIIKLPKYSLFELENGRKRMLASAGELQKGNELALPSKYVNFLYLASHYEKLKGSPEDNEQKQLFVEQHKHYLDEIIEQISEFSKRVILADANLDKVLSAYNKHRDKPIREQAENIIHLFTLTNLGAPAAFKYFDTTIDRKRYTSTKEVLDATLIHQSITGLYETRIDLSQLGGDGGPAPGGGEAAAKGGTLGDQGSRGSDPLPEPRVTLTVEGIPTEFLVNTGAEHSVLTKPMGKMGSKRTVVAGATGSKVYPWTTKRLLKIGQKQVTHSFLVIPECPAPLLGRDLLTKLKAQIQFSTEGPQVTWEDRPAMCLVLNLEEEYRLHEKPVPPSIDPSWLQLFPMVWAEKAGMGLANQVPPVVVELKSDASPVAVRQYPMSKEAREGIRPHIQRFLDLGILVPCQSPWNTPLLPVKKPGTNDYRPVQDLREVNKRVQDIHPTVPNPYNLLSSLPPSHTWYSVLDLKDAFFCLKLHPNSQPLFAFEWRDPEKGNTGQLTWTRLPQGFKNSPTLFNEALHRDLASFRALNPQVVMLQYVDDLLVAAPTYRDCKEGTRRLLQELSKLGYRVSAKKAQLCREEVTYLGYLLKGGKRWLTPARKATVMKIPTPTTPRQVREFLGKAGFCRLFIPGFASLAAPLYPLTRPKVPFTWTEAHQEAFGRIKEALLSAPALALPDLTKPFALYVDEKEGVARGVLTQTLGPWRRPVAYLSKKLDPVASGWPTCLKAIAAVALLLKDADKLTLGQNVLVIAPHNLESIVRQPPDRWMTNARMTHYQSLLLNERVSFAPPAILNPATLLPVESDDTPIHICSEILAEETGTRPDLRDQPLPGVPAWYTDGSSFIMDGRRQAGAAIVDNKRTVWASNLPEGTSAQKAELIALTQALRLAEGKSINIYTDSRYAFATAHVHGAIYKQRGWLTSAGKDIKNKEEILALLEAIHLPKRVAIIHCPGHQRGTDPVATGNRKADEAAKQAAQSTRILTETTKNAGKRTADGSEFEKRTADGSEFESPKKKAKVE

SEQ ID NO: 7534 - protein, 2096 aa, synthetic construct
MPAAKRVKLDGGDKKYSIGLDIGTNSVGWAVITDEYKVPSKKFKVLGNTDRHSIKKNLIGALLFDSGETAEATRLKRTARRRYTRRKNRICYLQEIFSNEMAKVDDSFFHRLEESFLVEEDKKHERHPIFGNIVDEVAYHEKYPTIYHLRKKLVDSTDKADLRLIYLALAHMIKFRGHFLIEGDLNPDNSDVDKLFIQLVQTYNQLFEENPINASGVDAKAILSARLSKSRRLENLIAQLPGEKKNGLFGNLIALSLGLTPNFKSNFDLAEDAKLQLSKDTYDDDLDNLLAQIGDQYADLFLAAKNLSDAILLSDILRVNTEITKAPLSASMIKRYDEHHQDLTLLKALVRQQLPEKYKEIFFDQSKNGYAGYIDGGASQEEFYKFIKPILEKMDGTEELLVKLNREDLLRKQRTFDNGSIPHQIHLGELHAILRRQEDFYPFLKDNREKIEKILTFRIPYYVGPLARGNSRFAWMTRKSEETITPWNFEEVVDKGASAQSFIERMTNFDKNLPNEKVLPKHSLLYEYFTVYNELTKVKYVTEGMRKPAFLSGEQKKAIVDLLFKTNRKVTVKQLKEDYFKKIECFDSVEISGVEDRFNASLGTYHDLLKIIKDKDFLDNEENEDILEDIVLTLTLFEDREMIEERLKTYAHLFDDKVMKQLKRRRYTGWGRLSRKLINGIRDKQSGKTILDFLKSDGFANRNFMQLIHDDSLTFKEDIQKAQVSGQGDSLHEHIANLAGSPAIKKGILQTVKVVDELVKVMGRHKPENIVIEMARENQTTQKGQKNSRERMKRIEEGIKELGSQILKEHPVENTQLQNEKLYLYYLQNGRDMYVDQELDINRLSDYDVDHIVPQSFLKDDSIDNKVLTRSDKARGKSDNVPSEEVVKKMKNYWRQLLNAKLITQRKFDNLTKAERGGLSELDKAGFIKRQLVETRQITKHVAQILDSRMNTKYDENDKLIREVKVITLKSKLVSDFRKDFQFYKVREINNYHHAHDAYLNAVVGTALIKKYPKLESEFVYGDYKVYDVRKMIAKSEQEIGKATAKYFFYSNIMNFFKTEITLANGEIRKRPLIETNGETGEIVWDKGRDFATVRKVLSMPQVNIVKKTEVQTGGFSKESILPKRNSDKLIARKKDWDPKKYGGFDSPTVAYSVLVVAKVEKGKSKKLKSVKELLGITIMERSSFEKNPIDFLEAKGYKEVKKDLIIKLPKYSLFELENGRKRMLASAGELQKGNELALPSKYVNFLYLASHYEKLKGSPEDNEQKQLFVEQHKHYLDEIIEQISEFSKRVILADANLDKVLSAYNKHRDKPIREQAENIIHLFTLTNLGAPAAFKYFDTTIDRKRYTSTKEVLDATLIHQSITGLYETRIDLSQLGGDGGPAPGGGEAAAKGGTLNLEDEYRLYETSAEPEVSPGSTWLSDFPQAWAETGGMGLAVRQAPLIIPLKATSTPVSIKQYPMSQEAKLGIKPHIQRLLDQGILVPCQSPWNTPLLPVKKPGTNDYRPVQDLREVNKRVEDIHPTVPNPYNLLSGLPPSHRWYTVLDLKDAFFCLRLHPTSQPLFAFEWRDPGMGISGQLTWTRLPQGFKNSPTLFNEALHRDLADFRIQHPDLILLQYVDDILLAATSELDCQQGTRALLLTLGNLGYRASAKKAQLCQKQVKYLGYLLKEGQRWLTEARKETVMGQPTPKTPRQLREFLGTAGFCRLWIPGFAEMAAPLYPLTKPGTLFNWGPDQQKAYQEIKQALLTAPALGLPDLTKPFELFVDEKQGYAKGVLTQKLGPWRRPVAYLSKKLDPVAAGWPPCLRMVAAIAVLRKDAGKLTMGQPLVILAPHAVEALVKQPPDRWLSNARMTHYQAMLLDTDRVQFGPVVALNPATLLPLPEEGAPHDCLEILAETHGTRPDLTDQPIPDADHTWYTDGSSFLQEGQRKAGAAVTTETEVIWARALPAGTSAQRAELIALTQALKMAEGKRLNVYTDSRYAFATAHIHGEIYRRRGWLTSEGREIKNKSEILALLKALFLPKRLSIIHCLGHQKGDSAEARGNRLADQAAREAAIKTPPDTSTLLAGKRTADGSEFEKRTADGSEFESPKKKAKVE

SEQ ID NO: 7535 - protein, 2096 aa, synthetic construct
MPAAKRVKLDGGDKKYSIGLDIGTNSVGWAVITDEYKVPSKKFKVLGNTDRHSIKKNLIGALLFDSGETAEATRLKRTARRRYTRRKNRICYLQEIFSNEMAKVDDSFFHRLEESFLVEEDKKHERHPIFGNIVDEVAYHEKYPTIYHLRKKLVDSTDKADLRLIYLALAHMIKFRGHFLIEGDLNPDNSDVDKLFIQLVQTYNQLFEENPINASGVDAKAILSARLSKSRRLENLIAQLPGEKKNGLFGNLIALSLGLTPNFKSNFDLAEDAKLQLSKDTYDDDLDNLLAQIGDQYADLFLAAKNLSDAILLSDILRVNTEITKAPLSASMIKRYDEHHQDLTLLKALVRQQLPEKYKEIFFDQSKNGYAGYIDGGASQEEFYKFIKPILEKMDGTEELLVKLNREDLLRKQRTFDNGSIPHQIHLGELHAILRRQEDFYPFLKDNREKIEKILTFRIPYYVGPLARGNSRFAWMTRKSEETITPWNFEEVVDKGASAQSFIERMTNFDKNLPNEKVLPKHSLLYEYFTVYNELTKVKYVTEGMRKPAFLSGEQKKAIVDLLFKTNRKVTVKQLKEDYFKKIECFDSVEISGVEDRFNASLGTYHDLLKIIKDKDFLDNEENEDILEDIVLTLTLFEDREMIEERLKTYAHLFDDKVMKQLKRRRYTGWGRLSRKLINGIRDKQSGKTILDFLKSDGFANRNFMQLIHDDSLTFKEDIQKAQVSGQGDSLHEHIANLAGSPAIKKGILQTVKVVDELVKVMGRHKPENIVIEMARENQTTQKGQKNSRERMKRIEEGIKELGSQILKEHPVENTQLQNEKLYLYYLQNGRDMYVDQELDINRLSDYDVDHIVPQSFLKDDSIDNKVLTRSDKARGKSDNVPSEEVVKKMKNYWRQLLNAKLITQRKFDNLTKAERGGLSELDKAGFIKRQLVETRQITKHVAQILDSRMNTKYDENDKLIREVKVITLKSKLVSDFRKDFQFYKVREINNYHHAHDAYLNAVVGTALIKKYPKLESEFVYGDYKVYDVRKMIAKSEQEIGKATAKYFFYSNIMNFFKTEITLANGEIRKRPLIETNGETGEIVWDKGRDFATVRKVLSMPQVNIVKKTEVQTGGFSKESILPKRNSDKLIARKKDWDPKKYGGFDSPTVAYSVLVVAKVEKGKSKKLKSVKELLGITIMERSSFEKNPIDFLEAKGYKEVKKDLIIKLPKYSLFELENGRKRMLASAGELQKGNELALPSKYVNFLYLASHYEKLKGSPEDNEQKQLFVEQHKHYLDEIIEQISEFSKRVILADANLDKVLSAYNKHRDKPIREQAENIIHLFTLTNLGAPAAFKYFDTTIDRKRYTSTKEVLDATLIHQSITGLYETRIDLSQLGGDGGPAPGGGEAAAKGGTLGIEDEYRLHETSTEPDVSLGSTWLSDFPQAWAETGGMGLAVRQAPLIIPLKATSTPVSIQQYPMSHEARLGIKPHIQRLLDQGILVPCQSPWNTPLLPVKKPGTNDYRPVQDLREVNKRVEDIHPTVPNPYNLLSGLPPSHQWYTVLDLKDAFFCLRLHPTSQPLFAFEWRDPGMGISGQLTWTRLPQGFKNSPTLFNEALHRDLADFRIQHPDLILLQYVDDILLAATSELDCQQGTRALLQTLGDLGYRASAKKAQICQKQVKYLGYLLREGQRWLTEARKETVMGQPVPKTPRQLREFLGTAGFCRLWIPGFAEMAAPLYPLTKPGTLFSWGPDQQKAYQEIKQALLTAPALGLPDLTKPFELFVDEKQGYAKGVLTQKLGPWRRPVAYLSKKLDPVAAGWPPCLRMVAAIAVLTKDAGKLTMGQPLVILAPHAVEALVKQPPDRWLSNARMTHYQAMLLDTDRVQFGPVVALNPATLLPLPEEGAPHDCLEILAETHGTRPDLTDQPIPDADHTWYTDGSSFLQEGQRKAGAAVTTETEVIWAGALPAGTSAQRAELIALTQALKMAEGKRLNVYTDSRYAFATAHIHGEIYRRRGWLTSEGREIKNKSEILALLKALFLPKRLSIIHCLGHQKGDSAEARGNRLADQAAREAAIKTPPDTSTLLAGKRTADGSEFEKRTADGSEFESPKKKAKVE

SEQ ID NO: 7536 - protein, 2096 aa, synthetic construct
MPAAKRVKLDGGDKKYSIGLDIGTNSVGWAVITDEYKVPSKKFKVLGNTDRHSIKKNLIGALLFDSGETAEATRLKRTARRRYTRRKNRICYLQEIFSNEMAKVDDSFFHRLEESFLVEEDKKHERHPIFGNIVDEVAYHEKYPTIYHLRKKLVDSTDKADLRLIYLALAHMIKFRGHFLIEGDLNPDNSDVDKLFIQLVQTYNQLFEENPINASGVDAKAILSARLSKSRRLENLIAQLPGEKKNGLFGNLIALSLGLTPNFKSNFDLAEDAKLQLSKDTYDDDLDNLLAQIGDQYADLFLAAKNLSDAILLSDILRVNTEITKAPLSASMIKRYDEHHQDLTLLKALVRQQLPEKYKEIFFDQSKNGYAGYIDGGASQEEFYKFIKPILEKMDGTEELLVKLNREDLLRKQRTFDNGSIPHQIHLGELHAILRRQEDFYPFLKDNREKIEKILTFRIPYYVGPLARGNSRFAWMTRKSEETITPWNFEEVVDKGASAQSFIERMTNFDKNLPNEKVLPKHSLLYEYFTVYNELTKVKYVTEGMRKPAFLSGEQKKAIVDLLFKTNRKVTVKQLKEDYFKKIECFDSVEISGVEDRFNASLGTYHDLLKIIKDKDFLDNEENEDILEDIVLTLTLFEDREMIEERLKTYAHLFDDKVMKQLKRRRYTGWGRLSRKLINGIRDKQSGKTILDFLKSDGFANRNFMQLIHDDSLTFKEDIQKAQVSGQGDSLHEHIANLAGSPAIKKGILQTVKVVDELVKVMGRHKPENIVIEMARENQTTQKGQKNSRERMKRIEEGIKELGSQILKEHPVENTQLQNEKLYLYYLQNGRDMYVDQELDINRLSDYDVDHIVPQSFLKDDSIDNKVLTRSDKARGKSDNVPSEEVVKKMKNYWRQLLNAKLITQRKFDNLTKAERGGLSELDKAGFIKRQLVETRQITKHVAQILDSRMNTKYDENDKLIREVKVITLKSKLVSDFRKDFQFYKVREINNYHHAHDAYLNAVVGTALIKKYPKLESEFVYGDYKVYDVRKMIAKSEQEIGKATAKYFFYSNIMNFFKTEITLANGEIRKRPLIETNGETGEIVWDKGRDFATVRKVLSMPQVNIVKKTEVQTGGFSKESILPKRNSDKLIARKKDWDPKKYGGFDSPTVAYSVLVVAKVEKGKSKKLKSVKELLGITIMERSSFEKNPIDFLEAKGYKEVKKDLIIKLPKYSLFELENGRKRMLASAGELQKGNELALPSKYVNFLYLASHYEKLKGSPEDNEQKQLFVEQHKHYLDEIIEQISEFSKRVILADANLDKVLSAYNKHRDKPIREQAENIIHLFTLTNLGAPAAFKYFDTTIDRKRYTSTKEVLDATLIHQSITGLYETRIDLSQLGGDGGPAPGGGEAAAKGGTLNIEDEYRLHETSKEPDVSLGSTWLSDFPQAWAETGGMGLAVRQAPLIIPLKATSTPVSIKQYPMSQEARLGIKPHIQRLLDQGILVPCQSPWNTPLLPVKKPGTNDYRPVQDLREVNKRVEDIHPTVPNPYNLLSGLPPSHQWYTVLDLKDAFFCLRLHPTSQPLFAFEWRDPEMGISGQLTWTRLPQGFKNSPTLFNEALHRDLAGFRIQHPDLILLQYVDDLLLAATSELDCQQGTRALLQTLGDLGYRASAKKAQICQKQVKYLGYLLKEGQRWLTEARKETVMGQPIPKTPRQLREFLGTAGFCRLWIPGFAEMAAPLYPLTKPGTLFNWGPDQQKAFQEIKQALLTAPALGLPDLTKPFELFVDEKQGYAKGVLTQKLGPWRRPVAYLSKKLDPVAAGWPPCLRMVAAIAVLTKDAGKLTMGQPLVILAPHAVEALVKQPPDRWLSNARMTHYQALLLDTDRVQFGPVVALNPATLLPLPEEGLQHDCLDILAEAHGTRSDLMDQPLPDADHTWYTDGSSFLQEGQRKAGAAVTTETEVIWARALPAGTSAQRAELIALTQALKMAEGKKLNVYTDSRYAFATAHIHGEIYRRRGWLTSEGKEIKNKDEILALLKALFLPKRLSIIHCPGHQKGNSAEARGNRMADQAAREVATRETPETSTLLAGKRTADGSEFEKRTADGSEFESPKKKAKVE

SEQ ID NO: 7537 - protein, 2096 aa, synthetic construct
MPAAKRVKLDGGDKKYSIGLDIGTNSVGWAVITDEYKVPSKKFKVLGNTDRHSIKKNLIGALLFDSGETAEATRLKRTARRRYTRRKNRICYLQEIFSNEMAKVDDSFFHRLEESFLVEEDKKHERHPIFGNIVDEVAYHEKYPTIYHLRKKLVDSTDKADLRLIYLALAHMIKFRGHFLIEGDLNPDNSDVDKLFIQLVQTYNQLFEENPINASGVDAKAILSARLSKSRRLENLIAQLPGEKKNGLFGNLIALSLGLTPNFKSNFDLAEDAKLQLSKDTYDDDLDNLLAQIGDQYADLFLAAKNLSDAILLSDILRVNTEITKAPLSASMIKRYDEHHQDLTLLKALVRQQLPEKYKEIFFDQSKNGYAGYIDGGASQEEFYKFIKPILEKMDGTEELLVKLNREDLLRKQRTFDNGSIPHQIHLGELHAILRRQEDFYPFLKDNREKIEKILTFRIPYYVGPLARGNSRFAWMTRKSEETITPWNFEEVVDKGASAQSFIERMTNFDKNLPNEKVLPKHSLLYEYFTVYNELTKVKYVTEGMRKPAFLSGEQKKAIVDLLFKTNRKVTVKQLKEDYFKKIECFDSVEISGVEDRFNASLGTYHDLLKIIKDKDFLDNEENEDILEDIVLTLTLFEDREMIEERLKTYAHLFDDKVMKQLKRRRYTGWGRLSRKLINGIRDKQSGKTILDFLKSDGFANRNFMQLIHDDSLTFKEDIQKAQVSGQGDSLHEHIANLAGSPAIKKGILQTVKVVDELVKVMGRHKPENIVIEMARENQTTQKGQKNSRERMKRIEEGIKELGSQILKEHPVENTQLQNEKLYLYYLQNGRDMYVDQELDINRLSDYDVDHIVPQSFLKDDSIDNKVLTRSDKARGKSDNVPSEEVVKKMKNYWRQLLNAKLITQRKFDNLTKAERGGLSELDKAGFIKRQLVETRQITKHVAQILDSRMNTKYDENDKLIREVKVITLKSKLVSDFRKDFQFYKVREINNYHHAHDAYLNAVVGTALIKKYPKLESEFVYGDYKVYDVRKMIAKSEQEIGKATAKYFFYSNIMNFFKTEITLANGEIRKRPLIETNGETGEIVWDKGRDFATVRKVLSMPQVNIVKKTEVQTGGFSKESILPKRNSDKLIARKKDWDPKKYGGFDSPTVAYSVLVVAKVEKGKSKKLKSVKELLGITIMERSSFEKNPIDFLEAKGYKEVKKDLIIKLPKYSLFELENGRKRMLASAGELQKGNELALPSKYVNFLYLASHYEKLKGSPEDNEQKQLFVEQHKHYLDEIIEQISEFSKRVILADANLDKVLSAYNKHRDKPIREQAENIIHLFTLTNLGAPAAFKYFDTTIDRKRYTSTKEVLDATLIHQSITGLYETRIDLSQLGGDGGPAPGGGEAAAKGGTLNIEDEHRLHETSKEPDVSLGSTWLSDFPQAWAETGGMGLAVRQAPLIIPLKATSTPVSIKQYPMSQEARLGIKPHIQRLLDQGILVPCQSPWNTPLLPVKKPGTNDYRPVQDLREVNKRVEDIHPTVPNPYNLLSGLPPSHQWYTVLDLKDAFFCLRLHPTSQPLFAFEWRDPEMGISGQLTWTRLPQGFKNSPTLFNEALHRDLADFRIQHPDLILLQYVDDLLLAATSELDCQQGTRALLQTLGNLGYRASAKKAQICQKQVKYLGYLLKEGQRWLTEARKETVMGQPTPKTPRQLREFLGTAGFCRLWIPGFAEMAAPLYPLTKPGTLFNWGPDQQKAYQEIKQALLTAPALGLPDLTKPFELFVDEKQGYAKGVLTQKLGPWRRPVAYLSKKLDPVAAGWPPCLRMVAAIAVLTKDAGKLTMGQPLVILAPHAVEALVKQPPDRWLSNARMTHYQALLLDTDRVQFGPVVALNPATLLPLPEEGLQHNCLDILAEAHGTRPDLTDQPLPDADHTWYTDGSSLLQEGQRKAGAAVTTETEVIWAKALPAGTSAQRAELIALTQALKMAEGKKLNVYTDSRYAFATAHIHGEIYRRRGWLTSEGKEIKNKDEILALLKALFLPKRLSIIHCPGHQKGHSAEARGNRMADQAARKAAITETPDTSTLLAGKRTADGSEFEKRTADGSEFESPKKKAKVE

SEQ ID NO: 7538 - protein, 2096 aa, synthetic construct
MPAAKRVKLDGGDKKYSIGLDIGTNSVGWAVITDEYKVPSKKFKVLGNTDRHSIKKNLIGALLFDSGETAEATRLKRTARRRYTRRKNRICYLQEIFSNEMAKVDDSFFHRLEESFLVEEDKKHERHPIFGNIVDEVAYHEKYPTIYHLRKKLVDSTDKADLRLIYLALAHMIKFRGHFLIEGDLNPDNSDVDKLFIQLVQTYNQLFEENPINASGVDAKAILSARLSKSRRLENLIAQLPGEKKNGLFGNLIALSLGLTPNFKSNFDLAEDAKLQLSKDTYDDDLDNLLAQIGDQYADLFLAAKNLSDAILLSDILRVNTEITKAPLSASMIKRYDEHHQDLTLLKALVRQQLPEKYKEIFFDQSKNGYAGYIDGGASQEEFYKFIKPILEKMDGTEELLVKLNREDLLRKQRTFDNGSIPHQIHLGELHAILRRQEDFYPFLKDNREKIEKILTFRIPYYVGPLARGNSRFAWMTRKSEETITPWNFEEVVDKGASAQSFIERMTNFDKNLPNEKVLPKHSLLYEYFTVYNELTKVKYVTEGMRKPAFLSGEQKKAIVDLLFKTNRKVTVKQLKEDYFKKIECFDSVEISGVEDRFNASLGTYHDLLKIIKDKDFLDNEENEDILEDIVLTLTLFEDREMIEERLKTYAHLFDDKVMKQLKRRRYTGWGRLSRKLINGIRDKQSGKTILDFLKSDGFANRNFMQLIHDDSLTFKEDIQKAQVSGQGDSLHEHIANLAGSPAIKKGILQTVKVVDELVKVMGRHKPENIVIEMARENQTTQKGQKNSRERMKRIEEGIKELGSQILKEHPVENTQLQNEKLYLYYLQNGRDMYVDQELDINRLSDYDVDHIVPQSFLKDDSIDNKVLTRSDKARGKSDNVPSEEVVKKMKNYWRQLLNAKLITQRKFDNLTKAERGGLSELDKAGFIKRQLVETRQITKHVAQILDSRMNTKYDENDKLIREVKVITLKSKLVSDFRKDFQFYKVREINNYHHAHDAYLNAVVGTALIKKYPKLESEFVYGDYKVYDVRKMIAKSEQEIGKATAKYFFYSNIMNFFKTEITLANGEIRKRPLIETNGETGEIVWDKGRDFATVRKVLSMPQVNIVKKTEVQTGGFSKESILPKRNSDKLIARKKDWDPKKYGGFDSPTVAYSVLVVAKVEKGKSKKLKSVKELLGITIMERSSFEKNPIDFLEAKGYKEVKKDLIIKLPKYSLFELENGRKRMLASAGELQKGNELALPSKYVNFLYLASHYEKLKGSPEDNEQKQLFVEQHKHYLDEIIEQISEFSKRVILADANLDKVLSAYNKHRDKPIREQAENIIHLFTLTNLGAPAAFKYFDTTIDRKRYTSTKEVLDATLIHQSITGLYETRIDLSQLGGDGGPAPGGGEAAAKGGTLNIEDEHRLHETSKEPDVSLGSTWLSDFPQAWAETGGMGLAVRQAPLIIPLKATSTPVSIKQYPMSQEARLGIKPHIQRLLDQGILVPCQSPWNTPLLPVKKPGTNDYRPVQDLREVNKRVEDIHPTVPNPYNLLSGLPPSHQWYTVLDLKDAFFCLRLHPTSQPLFAFEWRDPEMGISGQLTWTRLPQGFKNSPTLFDEALHRDLADFRIQHPDLILLQYVDDLLLAATSELDCQQGTRALLQTLGNLGYRASAKKAQICQKQVKYLGYLLKEGQRWLTEARKETVMGQPTPKTPRQLREFLGTAGFCRLWIPGFAEMAAPLYPLTKTGTLFNWGPDQQKAYQEIKQALLTAPALGLPDLTKPFELFVDEKQGYAKGVLTQKLGPWRRPVAYLSKKLDPVAAGWPPCLRMVAAIAVLTKDAGKLTMGQPLVILAPHAVEALVKQPPDRWLSNARMTHYQALLLDTDRVQFGPVVALNPATLLPLPEEGLQHNCLDILAEAHGTRPDLTDQPLPDADHTWYTDGSSLLQEGQRKAGAAVTTETEVIWAKALPAGTSAQRAELIALTQALKMAEGKKLNVYTDSRYAFATAHIHGEIYRRRGLLTSEGKEIKNKDEILALLKALFLPKRLSIIHCPGHQKGHSAEARGNRMADQAARKAAITETPDTSTLLAGKRTADGSEFEKRTADGSEFESPKKKAKVE

SEQ ID NO: 7539 - protein, 2096 aa, synthetic construct; identical to SEQ ID NO: 7537

SEQ ID NO: 7540 - protein, 2090 aa, synthetic construct
MPAAKRVKLDGGDKKYSIGLDIGTNSVGWAVITDEYKVPSKKFKVLGNTDRHSIKKNLIGALLFDSGETAEATRLKRTARRRYTRRKNRICYLQEIFSNEMAKVDDSFFHRLEESFLVEEDKKHERHPIFGNIVDEVAYHEKYPTIYHLRKKLVDSTDKADLRLIYLALAHMIKFRGHFLIEGDLNPDNSDVDKLFIQLVQTYNQLFEENPINASGVDAKAILSARLSKSRRLENLIAQLPGEKKNGLFGNLIALSLGLTPNFKSNFDLAEDAKLQLSKDTYDDDLDNLLAQIGDQYADLFLAAKNLSDAILLSDILRVNTEITKAPLSASMIKRYDEHHQDLTLLKALVRQQLPEKYKEIFFDQSKNGYAGYIDGGASQEEFYKFIKPILEKMDGTEELLVKLNREDLLRKQRTFDNGSIPHQIHLGELHAILRRQEDFYPFLKDNREKIEKILTFRIPYYVGPLARGNSRFAWMTRKSEETITPWNFEEVVDKGASAQSFIERMTNFDKNLPNEKVLPKHSLLYEYFTVYNELTKVKYVTEGMRKPAFLSGEQKKAIVDLLFKTNRKVTVKQLKEDYFKKIECFDSVEISGVEDRFNASLGTYHDLLKIIKDKDFLDNEENEDILEDIVLTLTLFEDREMIEERLKTYAHLFDDKVMKQLKRRRYTGWGRLSRKLINGIRDKQSGKTILDFLKSDGFANRNFMQLIHDDSLTFKEDIQKAQVSGQGDSLHEHIANLAGSPAIKKGILQTVKVVDELVKVMGRHKPENIVIEMARENQTTQKGQKNSRERMKRIEEGIKELGSQILKEHPVENTQLQNEKLYLYYLQNGRDMYVDQELDINRLSDYDVDHIVPQSFLKDDSIDNKVLTRSDKARGKSDNVPSEEVVKKMKNYWRQLLNAKLITQRKFDNLTKAERGGLSELDKAGFIKRQLVETRQITKHVAQILDSRMNTKYDENDKLIREVKVITLKSKLVSDFRKDFQFYKVREINNYHHAHDAYLNAVVGTALIKKYPKLESEFVYGDYKVYDVRKMIAKSEQEIGKATAKYFFYSNIMNFFKTEITLANGEIRKRPLIETNGETGEIVWDKGRDFATVRKVLSMPQVNIVKKTEVQTGGFSKESILPKRNSDKLIARKKDWDPKKYGGFDSPTVAYSVLVVAKVEKGKSKKLKSVKELLGITIMERSSFEKNPIDFLEAKGYKEVKKDLIIKLPKYSLFELENGRKRMLASAGELQKGNELALPSKYVNFLYLASHYEKLKGSPEDNEQKQLFVEQHKHYLDEIIEQISEFSKRVILADANLDKVLSAYNKHRDKPIREQAENIIHLFTLTNLGAPAAFKYFDTTIDRKRYTSTKEVLDATLIHQSITGLYETRIDLSQLGGDGGPAPGGGEAAAKGGTLQLDDEYRLYSPLVKPDQNIQFWLEQFPQAWAETAGMGLAKQVPPQVIQLKASATPVSVRQYPLSKEAQEGIRPHVQRLIQQGILVPVQSPWNTPLLPVRKPGTNDYRPVQDLREVNKRVQDIHPTVPNPYNLLCALPPQRSWYTVLDLKDAFFCLRLHPTSQPLFAFEWRDPGTGRTGQLTWTRLPQGFKNSPTIFDEALHRDLANFRIQHPQVTLLQYVDDLLLAGATKQDCLEGTKALLLELSDLGYRASAKKAQICRREVTYLGYSLRDGQRWLTEARKKTVVQIPAPTTAKQVREFLGTAGFCRLWIPGFATLAAPLYPLTKEKGEFSWAPEHQKAFDAIKKALLSAPALALPDVTKPFTLYVDERKGVARGVLTQTLGPWRRPVAYLSKKLDPVASGWPVCLKAIAAVAILVKDADKLTLGQNITVIAPHALENIVRQPPDRWMTNARMTHYQSLLLTERVTFAPPAALNPATLLPEETDEPVTHDCHQLLIEETGVRKDLTDIPLTGEVLTWFTDGSSYVVEGKRMAGAAVVDGTRTIWASSLPEGTSAQKAELMALTQALRLAEGKSINIYTDSRYAFATAHVHGAIYKQRGLLTSAGREIKNKEEILSLLEALHLPKRLAIIHCPGHQKAKDPISRGNQMADRVAKQAAQGVNLLAGKRTADGSEFEKRTADGSEFESPKKKAKVE

SEQ ID NO: 7541 - protein, 2090 aa, synthetic construct; identical to SEQ ID NO: 7540

SEQ ID NO: 7542 - protein, 2176 aa, synthetic construct
MPAAKRVKLDGGDKKYSIGLDIGTNSVGWAVITDEYKVPSKKFKVLGNTDRHSIKKNLIGALLFDSGETAEATRLKRTARRRYTRRKNRICYLQEIFSNEMAKVDDSFFHRLEESFLVEEDKKHERHPIFGNIVDEVAYHEKYPTIYHLRKKLVDSTDKADLRLIYLALAHMIKFRGHFLIEGDLNPDNSDVDKLFIQLVQTYNQLFEENPINASGVDAKAILSARLSKSRRLENLIAQLPGEKKNGLFGNLIALSLGLTPNFKSNFDLAEDAKLQLSKDTYDDDLDNLLAQIGDQYADLFLAAKNLSDAILLSDILRVNTEITKAPLSASMIKRYDEHHQDLTLLKALVRQQLPEKYKEIFFDQSKNGYAGYIDGGASQEEFYKFIKPILEKMDGTEELLVKLNREDLLRKQRTFDNGSIPHQIHLGELHAILRRQEDFYPFLKDNREKIEKILTFRIPYYVGPLARGNSRFAWMTRKSEETITPWNFEEVVDKGASAQSFIERMTNFDKNLPNEKVLPKHSLLYEYFTVYNELTKVKYVTEGMRKPAFLSGEQKKAIVDLLFKTNRKVTVKQLKEDYFKKIECFDSVEISGVEDRFNASLGTYHDLLKIIKDKDFLDNEENEDILEDIVLTLTLFEDREMIEERLKTYAHLFDDKVMKQLKRRRYTGWGRLSRKLINGIRDKQSGKTILDFLKSDGFANRNFMQLIHDDSLTFKEDIQKAQVSGQGDSLHEHIANLAGSPAIKKGILQTVKVVDELVKVMGRHKPENIVIEMARENQTTQKGQKNSRERMKRIEEGIKELGSQILKEHPVENTQLQNEKLYLYYLQNGRDMYVDQELDINRLSDYDVDHIVPQSFLKDDSIDNKVLTRSDKARGKSDNVPSEEVVKKMKNYWRQLLNAKLITQRKFDNLTKAERGGLSELDKAGFIKRQLVETRQITKHVAQILDSRMNTKYDENDKLIREVKVITLKSKLVSDFRKDFQFYKVREINNYHHAHDAYLNAVVGTALIKKYPKLESEFVYGDYKVYDVRKMIAKSEQEIGKATAKYFFYSNIMNFFKTEITLANGEIRKRPLIETNGETGEIVWDKGRDFATVRKVLSMPQVNIVKKTEVQTGGFSKESILPKRNSDKLIARKKDWDPKKYGGFDSPTVAYSVLVVAKVEKGKSKKLKSVKELLGITIMERSSFEKNPIDFLEAKGYKEVKKDLIIKLPKYSLFELENGRKRMLASAGELQKGNELALPSKYVNFLYLASHYEKLKGSPEDNEQKQLFVEQHKHYLDEIIEQISEFSKRVILADANLDKVLSAYNKHRDKPIREQAENIIHLFTLTNLGAPAAFKYFDTTIDRKRYTSTKEVLDATLIHQSITGLYETRIDLSQLGGDGGPAPGGGEAAAKGGMDPLQLLQPLEAEIKGTKLKAHWNSGATITCVPEAFLEDERPIQTMLIKTIHGEKQQDVYYLTFKVQGRKVEAEVLASPYDYILLNPSDVPWLMKKPLQLTVLVPLHEYQERLLQQTALPKEQKELLQKLFLKYDALWQHWENQVGHRRIKPHNIATGTLAPRPQKQYPINPKAKPSIQIVIDDLLKQGVLIQQNSTMNTPVYPVPKPDGKWRMVLDYREVNKTIPLIAAQNQHSAGILSSIYRGKYKTTLDLTNGFWAHPITPESYWLTAFTWQGKQYCWTRLPQGFLNSPALFNADVVDLLKEIPNVQAYVDDIYISHDDPQEHLEQLEKIFSILLNAGYVVSLKKSEIAQREVEFLGFNITKEGRGLTDTFKQKLLNITPPKDLKQLQSILGLLNFARNFIPNYSELVKPLYTIVAPANGKFISWTEDNSNQLQHIISVLNQADNLEERNPETRLIIKVNSSPSAGYIRYYNEGSKRPIMYVNYIFSKAEAKFTQTEKLLTTMHKGLIKAMDLAMGQEILVYSPIVSMTKIQRTPLPERKALPVRWITWMTYLEDPRIQFHYDKSLPELQQIPNVTEDVIAKTKHPSEFAMVFYTDGSAIKHPDVNKSHSAGMGIAQVQFIPEYKIVHQWSIPLGDHTAQLAEIAAVEFACKKALKISGPVLIVTDSFYVAESANKELPYWKSNGFLNNKKKPLRHVSKWKSIAECLQLKPDIIIMHEKGHQQPMTTLHTEGNNLADKLATQGSYVVHAGKRTADGSEFEKRTADGSEFESPKKKAKVE

SEQ ID NO: 7543 - protein, 2087 aa, synthetic construct
MPAAKRVKLDGGDKKYSIGLDIGTNSVGWAVITDEYKVPSKKFKVLGNTDRHSIKKNLIGALLFDSGETAEATRLKRTARRRYTRRKNRICYLQEIFSNEMAKVDDSFFHRLEESFLVEEDKKHERHPIFGNIVDEVAYHEKYPTIYHLRKKLVDSTDKADLRLIYLALAHMIKFRGHFLIEGDLNPDNSDVDKLFIQLVQTYNQLFEENPINASGVDAKAILSARLSKSRRLENLIAQLPGEKKNGLFGNLIALSLGLTPNFKSNFDLAEDAKLQLSKDTYDDDLDNLLAQIGDQYADLFLAAKNLSDAILLSDILRVNTEITKAPLSASMIKRYDEHHQDLTLLKALVRQQLPEKYKEIFFDQSKNGYAGYIDGGASQEEFYKFIKPILEKMDGTEELLVKLNREDLLRKQRTFDNGSIPHQIHLGELHAILRRQEDFYPFLKDNREKIEKILTFRIPYYVGPLARGNSRFAWMTRKSEETITPWNFEEVVDKGASAQSFIERMTNFDKNLPNEKVLPKHSLLYEYFTVYNELTKVKYVTEGMRKPAFLSGEQKKAIVDLLFKTNRKVTVKQLKEDYFKKIECFDSVEISGVEDRFNASLGTYHDLLKIIKDKDFLDNEENEDILEDIVLTLTLFEDREMIEERLKTYAHLFDDKVMKQLKRRRYTGWGRLSRKLINGIRDKQSGKTILDFLKSDGFANRNFMQLIHDDSLTFKEDIQKAQVSGQGDSLHEHIANLAGSPAIKKGILQTVKVVDELVKVMGRHKPENIVIEMARENQTTQKGQKNSRERMKRIEEGIKELGSQILKEHPVENTQLQNEKLYLYYLQNGRDMYVDQELDINRLSDYDVDHIVPQSFLKDDSIDNKVLTRSDKARGKSDNVPSEEVVKKMKNYWRQLLNAKLITQRKFDNLTKAERGGLSELDKAGFIKRQLVETRQITKHVAQILDSRMNTKYDENDKLIREVKVITLKSKLVSDFRKDFQFYKVREINNYHHAHDAYLNAVVGTALIKKYPKLESEFVYGDYKVYDVRKMIAKSEQEIGKATAKYFFYSNIMNFFKTEITLANGEIRKRPLIETNGETGEIVWDKGRDFATVRKVLSMPQVNIVKKTEVQTGGFSKESILPKRNSDKLIARKKDWDPKKYGGFDSPTVAYSVLVVAKVEKGKSKKLKSVKELLGITIMERSSFEKNPIDFLEAKGYKEVKKDLIIKLPKYSLFELENGRKRMLASAGELQKGNELALPSKYVNFLYLASHYEKLKGSPEDNEQKQLFVEQHKHYLDEIIEQISEFSKRVILADANLDKVLSAYNKHRDKPIREQAENIIHLFTLTNLGAPAAFKYFDTTIDRKRYTSTKEVLDATLIHQSITGLYETRIDLSQLGGDGGPAPGGGEAAAKGGIPWLMKKPLQLTTLVPLQEYEERLLKQTMLTGSYKEKLQSLFLKYDALWQHWENQVGHRRIKPHHIATGTVNPRPQKQYPINPKAKASIQTVINDLLKQGVLIQQNSIMNTPVYPVPKPDGKWRMVLDYREVNKTIPLIAAQNQHSAGILSSIFRGKYKTTLDLSNGFWAHSITPESYWLTAFTWLGQQYCWTRLPQGFLNSPALFNADVVDLLKEVPNVQVYVDDIYISHDDPREHLEQLEKVFSLLLNAGYVVSLKKSEIAQHEVEFLGFNITKEGRGLTETFKQKLLNITPPRDLKQLQSILGKLNFARNFIPNFSELVKPLYNIIATAPGKYITWTTDNSQQLQNIISMLNSAENLEERNPEVRLIMKVNTSPSAGYIRFYNEFAKRPIMYLNYVYTKAEVKFTNTEKLLTTIHKGLIKALDLGMGQEILVYSPIVSMTKIQKTPLPERKALPIRWITWMSYLEDPRIQFHYDKTLPELQQVPTVTDDIIAKIKHPSEFSMVFYTDGSAIKHPNVNKSHNAGMGIAQVQFKPEFTVINTWSIPLGDHTAQLAEVAAVEFACKKALKIDGPVLIVTDSFYVAESVNKELPYWQSNGFFNNKKKPLKHVSKWKSIADCIQLKPDIIIIHEKGHQPTASTFHTEGNNLADKLATQGSYVVNAGKRTADGSEFEKRTADGSEFESPKKKAKVE

SEQ ID NO: 7544 - protein, 2094 aa, synthetic construct
MPAAKRVKLDGGDKKYSIGLDIGTNSVGWAVITDEYKVPSKKFKVLGNTDRHSIKKNLIGALLFDSGETAEATRLKRTARRRYTRRKNRICYLQEIFSNEMAKVDDSFFHRLEESFLVEEDKKHERHPIFGNIVDEVAYHEKYPTIYHLRKKLVDSTDKADLRLIYLALAHMIKFRGHFLIEGDLNPDNSDVDKLFIQLVQTYNQLFEENPINASGVDAKAILSARLSKSRRLENLIAQLPGEKKNGLFGNLIALSLGLTPNFKSNFDLAEDAKLQLSKDTYDDDLDNLLAQIGDQYADLFLAAKNLSDAILLSDILRVNTEITKAPLSASMIKRYDEHHQDLTLLKALVRQQLPEKYKEIFFDQSKNGYAGYIDGGASQEEFYKFIKPILEKMDGTEELLVKLNREDLLRKQRTFDNGSIPHQIHLGELHAILRRQEDFYPFLKDNREKIEKILTFRIPYYVGPLARGNSRFAWMTRKSEETITPWNFEEVVDKGASAQSFIERMTNFDKNLPNEKVLPKHSLLYEYFTVYNELTKVKYVTEGMRKPAFLSGEQKKAIVDLLFKTNRKVTVKQLKEDYFKKIECFDSVEISGVEDRFNASLGTYHDLLKIIKDKDFLDNEENEDILEDIVLTLTLFEDREMIEERLKTYAHLFDDKVMKQLKRRRYTGWGRLSRKLINGIRDKQSGKTILDFLKSDGFANRNFMQLIHDDSLTFKEDIQKAQVSGQGDSLHEHIANLAGSPAIKKGILQTVKVVDELVKVMGRHKPENIVIEMARENQTTQKGQKNSRERMKRIEEGIKELGSQILKEHPVENTQLQNEKLYLYYLQNGRDMYVDQELDINRLSDYDVDHIVPQSFLKDDSIDNKVLTRSDKARGKSDNVPSEEVVKKMKNYWRQLLNAKLITQRKFDNLTKAERGGLSELDKAGFIKRQLVETRQITKHVAQILDSRMNTKYDENDKLIREVKVITLKSKLVSDFRKDFQFYKVREINNYHHAHDAYLNAVVGTALIKKYPKLESEFVYGDYKVYDVRKMIAKSEQEIGKATAKYFFYSNIMNFFKTEITLANGEIRKRPLIETNGETGEIVWDKGRDFATVRKVLSMPQVNIVKKTEVQTGGFSKESILPKRNSDKLIARKKDWDPKKYGGFDSPTVAYSVLVVAKVEKGKSKKLKSVKELLGITIMERSSFEKNPIDFLEAKGYKEVKKDLIIKLPKYSLFELENGRKRMLASAGELQKGNELALPSKYVNFLYLASHYEKLKGSPEDNEQKQLFVEQHKHYLDEIIEQISEFSKRVILADANLDKVLSAYNKHRDKPIREQAENIIHLFTLTNLGAPAAFKYFDTTIDRKRYTSTKEVLDATLIHQSITGLYETRIDLSQLGGDGGPAPGGGEAAAKGGVLNLEEEYRLHEKPVPSSIDPSWLQLFPTVWAERAGMGLANQVPPVVVELRSGASPVAVRQYPMSKEAREGIRPHIQRFLDLGVLVPCQSPWNTPLLPVKKPGTNDYRPVQDLREINKRVQDIHPTVPNPYNLLSSLPPSHTWYSVLDLKDAFFCLKLHPNSQPLFAFEWRDPEKGNTGQLTWTRLPQGFKNSPTLFNEALHRDLAPFRALNPQVVLLQYVDDLLVAAPTYRDCKEGTQKLLQELSKLGYRVSAKKAQLCQKEVTYLGYLLKEGKRWLTPARKATVMKIPPPTTPRQVREFLGTAGFCRLWIPGFASLAAPLYPLTKPSIPFIWTEEHQKAFDRIKEALLSAPALALPDLTKPFTLYVDERAGVARGVLTQTLGPWRRPVAYLSKKLDPVASGWPTCLKAVAAVALLLKDADKLTLGQNVTVIASHSLESIVRQPPDRWMTNARMTHYQSLLLNERVSFAPPAVLNPATLLPVESEATPVHRCSEILAEETGTRRDLKDQPLPGVPAWYTDGSSFIAEGKRRAGAAIVDGKRTVWASSLPEGTSAQKAELVALTQALRLAEGKDINIYTDSRYAFATAHIHGAIYKQRGWLTSAGKDIKNKEEILALLEAIHLPKRVAIIHCPGHQKGNDPVATGNRRADEAAKQAALSTRVLAETTKPAGKRTADGSEFEKRTADGSEFESPKKKAKVE

SEQ ID NO: 7545 - protein, 2094 aa, synthetic construct
MPAAKRVKLDGGDKKYSIGLDIGTNSVGWAVITDEYKVPSKKFKVLGNTDRHSIKKNLIGALLFDSGETAEATRLKRTARRRYTRRKNRICYLQEIFSNEMAKVDDSFFHRLEESFLVEEDKKHERHPIFGNIVDEVAYHEKYPTIYHLRKKLVDSTDKADLRLIYLALAHMIKFRGHFLIEGDLNPDNSDVDKLFIQLVQTYNQLFEENPINASGVDAKAILSARLSKSRRLENLIAQLPGEKKNGLFGNLIALSLGLTPNFKSNFDLAEDAKLQLSKDTYDDDLDNLLAQIGDQYADLFLAAKNLSDAILLSDILRVNTEITKAPLSASMIKRYDEHHQDLTLLKALVRQQLPEKYKEIFFDQSKNGYAGYIDGGASQEEFYKFIKPILEKMDGTEELLVKLNREDLLRKQRTFDNGSIPHQIHLGELHAILRRQEDFYPFLKDNREKIEKILTFRIPYYVGPLARGNSRFAWMTRKSEETITPWNFEEVVDKGASAQSFIERMTNFDKNLPNEKVLPKHSLLYEYFTVYNELTKVKYVTEGMRKPAFLSGEQKKAIVDLLFKTNRKVTVKQLKEDYFKKIECFDSVEISGVEDRFNASLGTYHDLLKIIKDKDFLDNEENEDILEDIVLTLTLFEDREMIEERLKTYAHLFDDKVMKQLKRRRYTGWGRLSRKLINGIRDKQSGKTILDFLKSDGFANRNFMQLIHDDSLTFKEDIQKAQVSGQGDSLHEHIANLAGSPAIKKGILQTVKVVDELVKVMGRHKPENIVIEMARENQTTQKGQKNSRERMKRIEEGIKELGSQILKEHPVENTQLQNEKLYLYYLQNGRDMYVDQELDINRLSDYDVDHIVPQSFLKDDSIDNKVLTRSDKARGKSDNVPSEEVVKKMKNYWRQLLNAKLITQRKFDNLTKAERGGLSELDKAGFIKRQLVETRQITKHVAQILDSRMNTKYDENDKLIREVKVITLKSKLVSDFRKDFQFYKVREINNYHHAHDAYLNAVVGTALIKKYPKLESEFVYGDYKVYDVRKMIAKSEQEIGKATAKYFFYSNIMNFFKTEITLANGEIRKRPLIETNGETGEIVWDKGRDFATVRKVLSMPQVNIVKKTEVQTGGFSKESILPKRNSDKLIARKKDWDPKKYGGFDSPTVAYSVLVVAKVEKGKSKKLKSVKELLGITIMERSSFEKNPIDFLEAKGYKEVKKDLIIKLPKYSLFELENGRKRMLASAGELQKGNELALPSKYVNFLYLASHYEKLKGSPEDNEQKQLFVEQHKHYLDEIIEQISEFSKRVILADANLDKVLSAYNKHRDKPIREQAENIIHLFTLTNLGAPAAFKYFDTTIDRKRYTSTKEVLDATLIHQSITGLYETRIDLSQLGGDGGPAPGGGEAAAKGGVLNLEEEYRLHEKPVPSSIDPSWLQLFPTVWAERAGMGLANQVPPVVVELRSGASPVAVRQYPMSKEAREGIRPHIQRFLDLGVLVPCQSPWNTPLLPVKKPGTNDYRPVQDLREINKRVQDIHPTVPNPYNLLSSLPPSHTWYSVLDLKDAFFCLKLHPNSQPLFAFEWRDPEKGNTGQLTWTRLPQGFKNSPTLFNEALHRDLAPFRALNPQVVLLQYVDDLLVAAPTYRDCKEGTQKLLQELSKLGYRVSAKKAQLCQKEVTYLGYLLKEGKRWLTPARKATVMKIPPPTTPRQVREFLGKAGFCRLFIPGFASLAAPLYPLTKPSIPFIWTEEHQKAFDRIKEALLSAPALALPDLTKPFTLYVDERAGVARGVLTQTLGPWRRPVAYLSKKLDPVASGWPTCLKAVAAVALLLKDADKLTLGQNVTVIASHSLESIVRQPPDRWMTNARMTHYQSLLLNERVSFAPPAVLNPATLLPVESEATPVHRCSEILAEETGTRRDLKDQPLPGVPAWYTDGSSFIAEGKRRAGAAIVDGKRTVWASSLPEGTSAQKAELVALTQALRLAEGKDINIYTDSRYAFATAHIHGAIYKQRGWLTSAGKDIKNKEEILALLEAIHLPKRVAIIHCPGHQKGNDPVATGNRRADEAAKQAALSTRVLAETTKPAGKRTADGSEFEKRTADGSEFESPKKKAKVE

SEQ ID NO: 7546 - protein, 2096 aa, synthetic construct
MPAAKRVKLDGGDKKYSIGLDIGTNSVGWAVITDEYKVPSKKFKVLGNTDRHSIKKNLIGALLFDSGETAEATRLKRTARRRYTRRKNRICYLQEIFSNEMAKVDDSFFHRLEESFLVEEDKKHERHPIFGNIVDEVAYHEKYPTIYHLRKKLVDSTDKADLRLIYLALAHMIKFRGHFLIEGDLNPDNSDVDKLFIQLVQTYNQLFEENPINASGVDAKAILSARLSKSRRLENLIAQLPGEKKNGLFGNLIALSLGLTPNFKSNFDLAEDAKLQLSKDTYDDDLDNLLAQIGDQYADLFLAAKNLSDAILLSDILRVNTEITKAPLSASMIKRYDEHHQDLTLLKALVRQQLPEKYKEIFFDQSKNGYAGYIDGGASQEEFYKFIKPILEKMDGTEELLVKLNREDLLRKQRTFDNGSIPHQIHLGELHAILRRQEDFYPFLKDNREKIEKILTFRIPYYVGPLARGNSRFAWMTRKSEETITPWNFEEVVDKGASAQSFIERMTNFDKNLPNEKVLPKHSLLYEYFTVYNELTKVKYVTEGMRKPAFLSGEQKKAIVDLLFKTNRKVTVKQLKEDYFKKIECFDSVEISGVEDRFNASLGTYHDLLKIIKDKDFLDNEENEDILEDIVLTLTLFEDREMIEERLKTYAHLFDDKVMKQLKRRRYTGWGRLSRKLINGIRDKQSGKTILDFLKSDGFANRNFMQLIHDDSLTFKEDIQKAQVSGQGDSLHEHIANLAGSPAIKKGILQTVKVVDELVKVMGRHKPENIVIEMARENQTTQKGQKNSRERMKRIEEGIKELGSQILKEHPVENTQLQNEKLYLYYLQNGRDMYVDQELDINRLSDYDVDHIVPQSFLKDDSIDNKVLTRSDKARGKSDNVPSEEVVKKMKNYWRQLLNAKLITQRKFDNLTKAERGGLSELDKAGFIKRQLVETRQITKHVAQILDSRMNTKYDENDKLIREVKVITLKSKLVSDFRKDFQFYKVREINNYHHAHDAYLNAVVGTALIKKYPKLESEFVYGDYKVYDVRKMIAKSEQEIGKATAKYFFYSNIMNFFKTEITLANGEIRKRPLIETNGETGEIVWDKGRDFATVRKVLSMPQVNIVKKTEVQTGGFSKESILPKRNSDKLIARKKDWDPKKYGGFDSPTVAYSVLVVAKVEKGKSKKLKSVKELLGITIMERSSFEKNPIDFLEAKGYKEVKKDLIIKLPKYSLFELENGRKRMLASAGELQKGNELALPSKYVNFLYLASHYEKLKGSPEDNEQKQLFVEQHKHYLDEIIEQISEFSKRVILADANLDKVLSAYNKHRDKPIREQAENIIHLFTLTNLGAPAAFKYFDTTIDRKRYTSTKEVLDATLIHQSITGLYETRIDLSQLGGDGGPAPGGGEAAAKGGTLNIEDEYRLHETSKEPDVPLGSTWLSDFPQAWAETGGMGLAVRQAPLIIPLKATSTPVSIKQYPMSQEARLGIKPHIQRLLDQGILVPCQSPWNTPLLPVKKPGTNDYRPVQDLREVNKRVEDIHPTVPNPYNLLSGLPPSHQWYTVLDLKDAFFCLRLHPTSQPLFAFEWRDPEMGISGQLTWTRLPQGFKNSPTLFNEALHRDLADFRIQHPDLILLQYVDDLLLAATSEQDCQRGTRALLQTLGNLGYRASAKKAQICQKQVKYLGYLLKEGQRWLTEARKETVMGQPTPKTPRQLREFLGTAGFCRLWIPGFAEMAAPLYPLTKPGTLFNWGPDQQKAYQEIKQALLTAPALGLPDLTKPFELFVDEKQGYAKGVLTQKLGPWRRPVAYLSKKLDPVAAGWPPCLRMVAAIAVLTKDAGKLTMGQPLVILAPHAVEALVKQPPDRWLSNARMTHYQAMLLDTDRVQFGPVVALNPATLLPLPEKEAPHDCLEILAETHGTRPDLTDQPIPDADYTWYTDGSSFLQEGQRRAGAAVTTETEVIWARALPAGTSAQRAELIALTQALKMAEGKKLNVYTDSRYAFATAHVHGEIYRRRGWLTSEGREIKNKNEILALLKALFLPKRLSIIHCPGHQKGNSAEARGNRMADQAAREAAMKAVLETSTLLAGKRTADGSEFEKRTADGSEFESPKKKAKVE

SEQ ID NO: 7547 - protein, 2096 aa, synthetic construct
MPAAKRVKLDGGDKKYSIGLDIGTNSVGWAVITDEYKVPSKKFKVLGNTDRHSIKKNLIGALLFDSGETAEATRLKRTARRRYTRRKNRICYLQEIFSNEMAKVDDSFFHRLEESFLVEEDKKHERHPIFGNIVDEVAYHEKYPTIYHLRKKLVDSTDKADLRLIYLALAHMIKFRGHFLIEGDLNPDNSDVDKLFIQLVQTYNQLFEENPINASGVDAKAILSARLSKSRRLENLIAQLPGEKKNGLFGNLIALSLGLTPNFKSNFDLAEDAKLQLSKDTYDDDLDNLLAQIGDQYADLFLAAKNLSDAILLSDILRVNTEITKAPLSASMIKRYDEHHQDLTLLKALVRQQLPEKYKEIFFDQSKNGYAGYIDGGASQEEFYKFIKPILEKMDGTEELLVKLNREDLLRKQRTFDNGSIPHQIHLGELHAILRRQEDFYPFLKDNREKIEKILTFRIPYYVGPLARGNSRFAWMTRKSEETITPWNFEEVVDKGASAQSFIERMTNFDKNLPNEKVLPKHSLLYEYFTVYNELTKVKYVTEGMRKPAFLSGEQKKAIVDLLFKTNRKVTVKQLKEDYFKKIECFDSVEISGVEDRFNASLGTYHDLLKIIKDKDFLDNEENEDILEDIVLTLTLFEDREMIEERLKTYAHLFDDKVMKQLKRRRYTGWGRLSRKLINGIRDKQSGKTILDFLKSDGFANRNFMQLIHDDSLTFKEDIQKAQVSGQGDSLHEHIANLAGSPAIKKGILQTVKVVDELVKVMGRHKPENIVIEMARENQTTQKGQKNSRERMKRIEEGIKELGSQILKEHPVENTQLQNEKLYLYYLQNGRDMYVDQELDINRLSDYDVDHIVPQSFLKDDSIDNKVLTRSDKARGKSDNVPSEEVVKKMKNYWRQLLNAKLITQRKFDNLTKAERGGLSELDKAGFIKRQLVETRQITKHVAQILDSRMNTKYDENDKLIREVKVITLKSKLVSDFRKDFQFYKVREINNYHHAHDAYLNAVVGTALIKKYPKLESEFVYGDYKVYDVRKMIAKSEQEIGKATAKYFFYSNIMNFFKTEITLANGEIRKRPLIETNGETGEIVWDKGRDFATVRKVLSMPQVNIVKKTEVQTGGFSKESILPKRNSDKLIARKKDWDPKKYGGFDSPTVAYSVLVVAKVEKGKSKKLKSVKELLGITIMERSSFEKNPIDFLEAKGYKEVKKDLIIKLPKYSLFELENGRKRMLASAGELQKGNELALPSKYVNFLYLASHYEKLKGSPEDNEQKQLFVEQHKHYLDEIIEQISEFSKRVILADANLDKVLSAYNKHRDKPIREQAENIIHLFTLTNLGAPAAFKYFDTTIDRKRYTSTKEVLDATLIHQSITGLYETRIDLSQLGGDGGPAPGGGEAAAKGGTLNIEDEYRLHETSKEPDVPLGSTWLSDFPQAWAETGGMGLAVRQAPLIIPLKATSTPVSIKQYPMSQEARLGIKPHIQRLLDQGILVPCQSPWNTPLLPVKKPGTNDYRPVQDLREVNKRVEDIHPTVPNPYNLLSGLPPSHQWYTVLDLKDAFFCLRLHPTSQPLFAFEWRDPEMGISGQLTWTRLPQGFKNSPTLFNEALHRDLADFRIQHPDLILLQYVDDLLLAATSEQDCQRGTRALLQTLGNLGYRASAKKAQICQKQVKYLGYLLKEGQRWLTEARKETVMGQPTPKTPRQLREFLGKAGFCRLFIPGFAEMAAPLYPLTKPGTLFNWGPDQQKAYQEIKQALLTAPALGLPDLTKPFELFVDEKQGYAKGVLTQKLGPWRRPVAYLSKKLDPVAAGWPPCLRMVAAIAVLTKDAGKLTMGQPLVILAPHAVEALVKQPPDRWLSNARMTHYQAMLLDTDRVQFGPVVALNPATLLPLPEKEAPHDCLEILAETHGTRPDLTDQPIPDADYTWYTDGSSFLQEGQRRAGAAVTTETEVIWARALPAGTSAQRAELIALTQALKMAEGKKLNVYTDSRYAFATAHVHGEIYRRRGWLTSEGREIKNKNEILALLKALFLPKRLSIIHCPGHQKGNSAEARGNRMADQAAREAAMKAVLETSTLLAGKRTADGSEFEKRTADGSEFESPKKKAKVE

SEQ ID NO: 7548 - protein, 2173 aa, synthetic construct
MPAAKRVKLDGGDKKYSIGLDIGTNSVGWAVITDEYKVPSKKFKVLGNTDRHSIKKNLIGALLFDSGETAEATRLKRTARRRYTRRKNRICYLQEIFSNEMAKVDDSFFHRLEESFLVEEDKKHERHPIFGNIVDEVAYHEKYPTIYHLRKKLVDSTDKADLRLIYLALAHMIKFRGHFLIEGDLNPDNSDVDKLFIQLVQTYNQLFEENPINASGVDAKAILSARLSKSRRLENLIAQLPGEKKNGLFGNLIALSLGLTPNFKSNFDLAEDAKLQLSKDTYDDDLDNLLAQIGDQYADLFLAAKNLSDAILLSDILRVNTEITKAPLSASMIKRYDEHHQDLTLLKALVRQQLPEKYKEIFFDQSKNGYAGYIDGGASQEEFYKFIKPILEKMDGTEELLVKLNREDLLRKQRTFDNGSIPHQIHLGELHAILRRQEDFYPFLKDNREKIEKILTFRIPYYVGPLARGNSRFAWMTRKSEETITPWNFEEVVDKGASAQSFIERMTNFDKNLPNEKVLPKHSLLYEYFTVYNELTKVKYVTEGMRKPAFLSGEQKKAIVDLLFKTNRKVTVKQLKEDYFKKIECFDSVEISGVEDRFNASLGTYHDLLKIIKDKDFLDNEENEDILEDIVLTLTLFEDREMIEERLKTYAHLFDDKVMKQLKRRRYTGWGRLSRKLINGIRDKQSGKTILDFLKSDGFANRNFMQLIHDDSLTFKEDIQKAQVSGQGDSLHEHIANLAGSPAIKKGILQTVKVVDELVKVMGRHKPENIVIEMARENQTTQKGQKNSRERMKRIEEGIKELGSQILKEHPVENTQLQNEKLYLYYLQNGRDMYVDQELDINRLSDYDVDHIVPQSFLKDDSIDNKVLTRSDKARGKSDNVPSEEVVKKMKNYWRQLLNAKLITQRKFDNLTKAERGGLSELDKAGFIKRQLVETRQITKHVAQILDSRMNTKYDENDKLIREVKVITLKSKLVSDFRKDFQFYKVREINNYHHAHDAYLNAVVGTALIKKYPKLESEFVYGDYKVYDVRKMIAKSEQEIGKATAKYFFYSNIMNFFKTEITLANGEIRKRPLIETNGETGEIVWDKGRDFATVRKVLSMPQVNIVKKTEVQTGGFSKESILPKRNSDKLIARKKDWDPKKYGGFDSPTVAYSVLVVAKVEKGKSKKLKSVKELLGITIMERSSFEKNPIDFLEAKGYKEVKKDLIIKLPKYSLFELENGRKRMLASAGELQKGNELALPSKYVNFLYLASHYEKLKGSPEDNEQKQLFVEQHKHYLDEIIEQISEFSKRVILADANLDKVLSAYNKHRDKPIREQAENIIHLFTLTNLGAPAAFKYFDTTIDRKRYTSTKEVLDATLIHQSITGLYETRIDLSQLGGDGGPAPEAAAKGGGGGMDLLKPLTVERKGVKIKGYWNSQADITCVPKDLLQGEEPVRQQNVTTIHGTQEGDVYYVNLKIDGRRINTEVIGTTLDYAIITPGDVPWILKKPLELTIKLDLEEQQGTLLNNSILSKKGKEELKQLFEKYSALWQSWENQVGHRRIRPHKIATGTVKPTPQKQYHINPKAKPDIQIVINDLLKQGVLIQKESTMNTPVYPVPKPNGRWRMVLDYRAVNKVTPLIAVQNQHSYGILGSLFKGRYKTTIDLSNGFWAHPIVPEDYWITAFTWQGKQYCWTVLPQGFLNSPGLFTGDVVDLLQGIPNVEVYVDDVYISHDSEKEHLEYLDILFNRLKEAGYIISLKKSNIANSIVDFLGFQITNEGRGLTDTFKEKLENITAPTTLKQLQSILGLLNFARNFIPDFTELIAPLYALIPKSTKNYVPWQIEHSTTLETLITKLNGAEYLQGRKGDKTLIMKVNASYTTGYIRYYNEGEKKPISYVSIVFSKTELKFTELEKLLTTVHKGLLKALDLSMGQNIHVYSPIVSMQNIQKTPQTAKKALASRWLSWLSYLEDPRIRFFYDPQMPALKDLPAVDTGKDNKKHPSNFQHIFYTDGSAITSPTKEGHLNAGMGIVYFINKDGNLQKQQEWSISLGNHTAQFAEIAAFEFALKKCLPLGGNILVVTDSNYVAKAYNEELDVWASNGFVNNRKKPLKHISKWKSVADLKRLRPDVVVTHEPGHQKLDSSPHAYGNNLADQLATQASFKVHAGKRTADGSEFEKRTADGSEFESPKKKAKVE

SEQ ID NO: 7549 - protein, 2087 aa, synthetic construct
MPAAKRVKLDGGDKKYSIGLDIGTNSVGWAVITDEYKVPSKKFKVLGNTDRHSIKKNLIGALLFDSGETAEATRLKRTARRRYTRRKNRICYLQEIFSNEMAKVDDSFFHRLEESFLVEEDKKHERHPIFGNIVDEVAYHEKYPTIYHLRKKLVDSTDKADLRLIYLALAHMIKFRGHFLIEGDLNPDNSDVDKLFIQLVQTYNQLFEENPINASGVDAKAILSARLSKSRRLENLIAQLPGEKKNGLFGNLIALSLGLTPNFKSNFDLAEDAKLQLSKDTYDDDLDNLLAQIGDQYADLFLAAKNLSDAILLSDILRVNTEITKAPLSASMIKRYDEHHQDLTLLKALVRQQLPEKYKEIFFDQSKNGYAGYIDGGASQEEFYKFIKPILEKMDGTEELLVKLNREDLLRKQRTFDNGSIPHQIHLGELHAILRRQEDFYPFLKDNREKIEKILTFRIPYYVGPLARGNSRFAWMTRKSEETITPWNFEEVVDKGASAQSFIERMTNFDKNLPNEKVLPKHSLLYEYFTVYNELTKVKYVTEGMRKPAFLSGEQKKAIVDLLFKTNRKVTVKQLKEDYFKKIECFDSVEISGVEDRFNASLGTYHDLLKIIKDKDFLDNEENEDILEDIVLTLTLFEDREMIEERLKTYAHLFDDKVMKQLKRRRYTGWGRLSRKLINGIRDKQSGKTILDFLKSDGFANRNFMQLIHDDSLTFKEDIQKAQVSGQGDSLHEHIANLAGSPAIKKGILQTVKVVDELVKVMGRHKPENIVIEMARENQTTQKGQKNSRERMKRIEEGIKELGSQILKEHPVENTQLQNEKLYLYYLQNGRDMYVDQELDINRLSDYDVDHIVPQSFLKDDSIDNKVLTRSDKARGKSDNVPSEEVVKKMKNYWRQLLNAKLITQRKFDNLTKAERGGLSELDKAGFIKRQLVETRQITKHVAQILDSRMNTKYDENDKLIREVKVITLKSKLVSDFRKDFQFYKVREINNYHHAHDAYLNAVVGTALIKKYPKLESEFVYGDYKVYDVRKMIAKSEQEIGKATAKYFFYSNIMNFFKTEITLANGEIRKRPLIETNGETGEIVWDKGRDFATVRKVLSMPQVNIVKKTEVQTGGFSKESILPKRNSDKLIARKKDWDPKKYGGFDSPTVAYSVLVVAKVEKGKSKKLKSVKELLGITIMERSSFEKNPIDFLEAKGYKEVKKDLIIKLPKYSLFELENGRKRMLASAGELQKGNELALPSKYVNFLYLASHYEKLKGSPEDNEQKQLFVEQHKHYLDEIIEQISEFSKRVILADANLDKVLSAYNKHRDKPIREQAENIIHLFTLTNLGAPAAFKYFDTTIDRKRYTSTKEVLDATLIHQSITGLYETRIDLSQLGGDGGPAPEAAAKGGGGGVPWILKKPLELTIKLDLEEQQGTLLNNSILSKKGKEELKQLFEKYSALWQSWENQVGHRRIRPHKIATGTVKPTPQKQYHINPKAKPDIQIVINDLLKQGVLIQKESTMNTPVYPVPKPNGRWRMVLDYRAVNKVTPLIAVQNQHSYGILGSLFKGRYKTTIDLSNGFWAHPIVPEDYWITAFTWQGKQYCWTVLPQGFLNSPGLFTGDVVDLLQGIPNVEVYVDDVYISHDSEKEHLEYLDILFNRLKEAGYIISLKKSNIANSIVDFLGFQITNEGRGLTDTFKEKLENITAPTTLKQLQSILGLLNFARNFIPDFTELIAPLYALIPKSTKNYVPWQIEHSTTLETLITKLNGAEYLQGRKGDKTLIMKVNASYTTGYIRYYNEGEKKPISYVSIVFSKTELKFTELEKLLTTVHKGLLKALDLSMGQNIHVYSPIVSMQNIQKTPQTAKKALASRWLSWLSYLEDPRIRFFYDPQMPALKDLPAVDTGKDNKKHPSNFQHIFYTDGSAITSPTKEGHLNAGMGIVYFINKDGNLQKQQEWSISLGNHTAQFAEIAAFEFALKKCLPLGGNILVVTDSNYVAKAYNEELDVWASNGFVNNRKKPLKHISKWKSVADLKRLRPDVVVTHEPGHQKLDSSPHAYGNNLADQLATQASFKVHAGKRTADGSEFEKRTADGSEFESPKKKAKVE

SEQ ID NO: 7550 - protein, 2095 aa, synthetic construct
MPAAKRVKLDGGDKKYSIGLDIGTNSVGWAVITDEYKVPSKKFKVLGNTDRHSIKKNLIGALLFDSGETAEATRLKRTARRRYTRRKNRICYLQEIFSNEMAKVDDSFFHRLEESFLVEEDKKHERHPIFGNIVDEVAYHEKYPTIYHLRKKLVDSTDKADLRLIYLALAHMIKFRGHFLIEGDLNPDNSDVDKLFIQLVQTYNQLFEENPINASGVDAKAILSARLSKSRRLENLIAQLPGEKKNGLFGNLIALSLGLTPNFKSNFDLAEDAKLQLSKDTYDDDLDNLLAQIGDQYADLFLAAKNLSDAILLSDILRVNTEITKAPLSASMIKRYDEHHQDLTLLKALVRQQLPEKYKEIFFDQSKNGYAGYIDGGASQEEFYKFIKPILEKMDGTEELLVKLNREDLLRKQRTFDNGSIPHQIHLGELHAILRRQEDFYPFLKDNREKIEKILTFRIPYYVGPLARGNSRFAWMTRKSEETITPWNFEEVVDKGASAQSFIERMTNFDKNLPNEKVLPKHSLLYEYFTVYNELTKVKYVTEGMRKPAFLSGEQKKAIVDLLFKTNRKVTVKQLKEDYFKKIECFDSVEISGVEDRFNASLGTYHDLLKIIKDKDFLDNEENEDILEDIVLTLTLFEDREMIEERLKTYAHLFDDKVMKQLKRRRYTGWGRLSRKLINGIRDKQSGKTILDFLKSDGFANRNFMQLIHDDSLTFKEDIQKAQVSGQGDSLHEHIANLAGSPAIKKGILQTVKVVDELVKVMGRHKPENIVIEMARENQTTQKGQKNSRERMKRIEEGIKELGSQILKEHPVENTQLQNEKLYLYYLQNGRDMYVDQELDINRLSDYDVDHIVPQSFLKDDSIDNKVLTRSDKARGKSDNVPSEEVVKKMKNYWRQLLNAKLITQRKFDNLTKAERGGLSELDKAGFIKRQLVETRQITKHVAQILDSRMNTKYDENDKLIREVKVITLKSKLVSDFRKDFQFYKVREINNYHHAHDAYLNAVVGTALIKKYPKLESEFVYGDYKVYDVRKMIAKSEQEIGKATAKYFFYSNIMNFFKTEITLANGEIRKRPLIETNGETGEIVWDKGRDFATVRKVLSMPQVNIVKKTEVQTGGFSKESILPKRNSDKLIARKKDWDPKKYGGFDSPTVAYSVLVVAKVEKGKSKKLKSVKELLGITIMERSSFEKNPIDFLEAKGYKEVKKDLIIKLPKYSLFELENGRKRMLASAGELQKGNELALPSKYVNFLYLASHYEKLKGSPEDNEQKQLFVEQHKHYLDEIIEQISEFSKRVILADANLDKVLSAYNKHRDKPIREQAENIIHLFTLTNLGAPAAFKYFDTTIDRKRYTSTKEVLDATLIHQSITGLYETRIDLSQLGGDGGPAPEAAAKGGGGGTLQLEEEYRLFEPESTQKQEMDIWLKNFPQAWAETGGMGTAHCQAPVLIQLKATATPISIRQYPMPHEAYQGIKPHIRRMLDQGILKPCQSPWNTPLLPVKKPGTEDYRPVQDLREVNKRVEDIHPTVPNPYNLLSTLPPSHPWYTVLDLKDAFFCLRLHSESQLLFAFEWRDPEIGLSGQLTWTRLPQGFKNSPTLFNEALHSDLADFRVRYPALVLLQYVDDLLLAAATRTECLEGTKALLETLGNKGYRASAKKAQICLQEVTYLGYSLKDGQRWLTKARKEAILSIPVPKNSRQVREFLGTAGYCRLWIPGFAELAAPLYPLTRPGTLFQWGTEQQLAFEDIKKALLSSPALGLPDITKPFELFIDENSGFAKGVLVQKLGPWKRPVAYLSKKLDTVASGWPPCLRMVAAIAILVKDAGKLTLGQPLTILTSHPVEALVRQPPNKWLSNARMTHYQAMLLDAERVHFGPTVSLNPATLLPLPSGGNHHDCLQILAETHGTRPDLTDQPLPDADLTWYTDGSSFIRNGEREAGAAVTTESEVIWAAPLPPGTSAQRAELIALTQALKMAEGKKLTVYTDSRYAFATTHVHGEIYRRRGWLTSEGKEIKNKNEILALLEALFLPKRLSIIHCPGHQKGDSPQAKGNRLADDTAKKAATETHSSLTVLPAGKRTADGSEFEKRTADGSEFESPKKKAKVE

SEQ ID NO: 7551 - protein, 2087 aa, synthetic construct
MPAAKRVKLDGGDKKYSIGLDIGTNSVGWAVITDEYKVPSKKFKVLGNTDRHSIKKNLIGALLFDSGETAEATRLKRTARRRYTRRKNRICYLQEIFSNEMAKVDDSFFHRLEESFLVEEDKKHERHPIFGNIVDEVAYHEKYPTIYHLRKKLVDSTDKADLRLIYLALAHMIKFRGHFLIEGDLNPDNSDVDKLFIQLVQTYNQLFEENPINASGVDAKAILSARLSKSRRLENLIAQLPGEKKNGLFGNLIALSLGLTPNFKSNFDLAEDAKLQLSKDTYDDDLDNLLAQIGDQYADLFLAAKNLSDAILLSDILRVNTEITKAPLSASMIKRYDEHHQDLTLLKALVRQQLPEKYKEIFFDQSKNGYAGYIDGGASQEEFYKFIKPILEKMDGTEELLVKLNREDLLRKQRTFDNGSIPHQIHLGELHAILRRQEDFYPFLKDNREKIEKILTFRIPYYVGPLARGNSRFAWMTRKSEETITPWNFEEVVDKGASAQSFIERMTNFDKNLPNEKVLPKHSLLYEYFTVYNELTKVKYVTEGMRKPAFLSGEQKKAIVDLLFKTNRKVTVKQLKEDYFKKIECFDSVEISGVEDRFNASLGTYHDLLKIIKDKDFLDNEENEDILEDIVLTLTLFEDREMIEERLKTYAHLFDDKVMKQLKRRRYTGWGRLSRKLINGIRDKQSGKTILDFLKSDGFANRNFMQLIHDDSLTFKEDIQKAQVSGQGDSLHEHIANLAGSPAIKKGILQTVKVVDELVKVMGRHKPENIVIEMARENQTTQKGQKNSRERMKRIEEGIKELGSQILKEHPVENTQLQNEKLYLYYLQNGRDMYVDQELDINRLSDYDVDHIVPQSFLKDDSIDNKVLTRSDKARGKSDNVPSEEVVKKMKNYWRQLLNAKLITQRKFDNLTKAERGGLSELDKAGFIKRQLVETRQITKHVAQILDSRMNTKYDENDKLIREVKVITLKSKLVSDFRKDFQFYKVREINNYHHAHDAYLNAVVGTALIKKYPKLESEFVYGDYKVYDVRKMIAKSEQEIGKATAKYFFYSNIMNFFKTEITLANGEIRKRPLIETNGETGEIVWDKGRDFATVRKVLSMPQVNIVKKTEVQTGGFSKESILPKRNSDKLIARKKDWDPKKYGGFDSPTVAYSVLVVAKVEKGKSKKLKSVKELLGITIMERSSFEKNPIDFLEAKGYKEVKKDLIIKLPKYSLFELENGRKRMLASAGELQKGNELALPSKYVNFLYLASHYEKLKGSPEDNEQKQLFVEQHKHYLDEIIEQISEFSKRVILADANLDKVLSAYNKHRDKPIREQAENIIHLFTLTNLGAPAAFKYFDTTIDRKRYTSTKEVLDATLIHQSITGLYETRIDLSQLGGDGGPAPEAAAKGGGGGVPWLTQQPLQLTILVPLQEYQEKILSKTALPEDQKQQLKTLFVKYDNLWQHWENQVGHRKIRPHNIATGDYPPRPQKQYPINPKAKPSIQIVIDDLLKQGVLTPQNSTMNTPVYPVPKPDGRWRMVLDYREVNKTIPLTAAQNQHSAGILATIVRQKYKTTLDLANGFWAHPITPESYWLTAFTWQGKQYCWTRLPQGFLNSPALFNADVVDLLKEIPNVQVYVDDIYLSHDDPKEHVQQLEKVFQILLQAGYVVSLKKSEIGQKTVEFLGFNITKEGRGLTDTFKTKLLNITPPKDLKQLQSILGKLNFARNFIPNFAELVQPLYNLIAPAKGKYIEWSEENTKQLNMVIEALNTASNLEERLPEQRLVIKVNTSPSAGYVRYYNETGKKPIMYLNYVFSKAELKFSMLEKLLTTMHKALIKAMDLAMGQEILVYSPIVSMTKIQKTPLPERKALPIRWITWMTYLEDPRIQFHYDKTLPELKHIPDVYTSSQSPVKHPSQYEGVFYTDGSAIKSPDPTKSNNAGMGIVHATYKPEYQVLNQWSIPLGNHTAQMAEIAAVEFACKKALKIPGPVLVITDSFYVAESANKELPYWKSNGFVNNKKKPLKHISKWKSIAECLSMKPDITIQHEKGISLQIPVFILKGNALADKLATQGSYVVNAGKRTADGSEFEKRTADGSEFESPKKKAKVE

SEQ ID NO: 7552 - protein, 2176 aa, synthetic construct
MPAAKRVKLDGGDKKYSIGLDIGTNSVGWAVITDEYKVPSKKFKVLGNTDRHSIKKNLIGALLFDSGETAEATRLKRTARRRYTRRKNRICYLQEIFSNEMAKVDDSFFHRLEESFLVEEDKKHERHPIFGNIVDEVAYHEKYPTIYHLRKKLVDSTDKADLRLIYLALAHMIKFRGHFLIEGDLNPDNSDVDKLFIQLVQTYNQLFEENPINASGVDAKAILSARLSKSRRLENLIAQLPGEKKNGLFGNLIALSLGLTPNFKSNFDLAEDAKLQLSKDTYDDDLDNLLAQIGDQYADLFLAAKNLSDAILLSDILRVNTEITKAPLSASMIKRYDEHHQDLTLLKALVRQQLPEKYKEIFFDQSKNGYAGYIDGGASQEEFYKFIKPILEKMDGTEELLVKLNREDLLRKQRTFDNGSIPHQIHLGELHAILRRQEDFYPFLKDNREKIEKILTFRIPYYVGPLARGNSRFAWMTRKSEETITPWNFEEVVDKGASAQSFIERMTNFDKNLPNEKVLPKHSLLYEYFTVYNELTKVKYVTEGMRKPAFLSGEQKKAIVDLLFKTNRKVTVKQLKEDYFKKIECFDSVEISGVEDRFNASLGTYHDLLKIIKDKDFLDNEENEDILEDIVLTLTLFEDREMIEERLKTYAHLFDDKVMKQLKRRRYTGWGRLSRKLINGIRDKQSGKTILDFLKSDGFANRNFMQLIHDDSLTFKEDIQKAQVSGQGDSLHEHIANLAGSPAIKKGILQTVKVVDELVKVMGRHKPENIVIEMARENQTTQKGQKNSRERMKRIEEGIKELGSQILKEHPVENTQLQNEKLYLYYLQNGRDMYVDQELDINRLSDYDVDHIVPQSFLKDDSIDNKVLTRSDKARGKSDNVPSEEVVKKMKNYWRQLLNAKLITQRKFDNLTKAERGGLSELDKAGFIKRQLVETRQITKHVAQILDSRMNTKYDENDKLIREVKVITLKSKLVSDFRKDFQFYKVREINNYHHAHDAYLNAVVGTALIKKYPKLESEFVYGDYKVYDVRKMIAKSEQEIGKATAKYFFYSNIMNFFKTEITLANGEIRKRPLIETNGETGEIVWDKGRDFATVRKVLSMPQVNIVKKTEVQTGGFSKESILPKRNSDKLIARKKDWDPKKYGGFDSPTVAYSVLVVAKVEKGKSKKLKSVKELLGITIMERSSFEKNPIDFLEAKGYKEVKKDLIIKLPKYSLFELENGRKRMLASAGELQKGNELALPSKYVNFLYLASHYEKLKGSPEDNEQKQLFVEQHKHYLDEIIEQISEFSKRVILADANLDKVLSAYNKHRDKPIREQAENIIHLFTLTNLGAPAAFKYFDTTIDRKRYTSTKEVLDATLIHQSITGLYETRIDLSQLGGDGGPAPEAAAKGGGGGMNPLQLLQPLPAEIKGTKLLAHWNSGATITCIPESFLEDEQPIKKTLIKTIHGEKQQNVYYVTFKVKGRKVEAEVIASPYEYILLSPTDVPWLTQQPLQLTILVPLQEYQEKILSKTALPEDQKQQLKTLFVKYDNLWQHWENQVGHRKIRPHNIATGDYPPRPQKQYPINPKAKPSIQIVIDDLLKQGVLTPQNSTMNTPVYPVPKPDGRWRMVLDYREVNKTIPLTAAQNQHSAGILATIVRQKYKTTLDLANGFWAHPITPESYWLTAFTWQGKQYCWTRLPQGFLNSPALFNADVVDLLKEIPNVQVYVDDIYLSHDDPKEHVQQLEKVFQILLQAGYVVSLKKSEIGQKTVEFLGFNITKEGRGLTDTFKTKLLNITPPKDLKQLQSILGLLNFARNFIPNFAELVQPLYNLIAPAKGKYIEWSEENTKQLNMVIEALNTASNLEERLPEQRLVIKVNTSPSAGYVRYYNETGKKPIMYLNYVFSKAELKFSMLEKLLTTMHKALIKAMDLAMGQEILVYSPIVSMTKIQKTPLPERKALPIRWITWMTYLEDPRIQFHYDKTLPELKHIPDVYTSSQSPVKHPSQYEGVFYTDGSAIKSPDPTKSNNAGMGIVHATYKPEYQVLNQWSIPLGNHTAQMAEIAAVEFACKKALKIPGPVLVITDSFYVAESANKELPYWKSNGFVNNKKKPLKHISKWKSIAECLSMKPDITIQHEKGISLQIPVFILKGNALADKLATQGSYVVNAGKRTADGSEFEKRTADGSEFESPKKKAKVE

SEQ ID NO: 7553 - protein, 2176 aa, synthetic construct
MPAAKRVKLDGGDKKYSIGLDIGTNSVGWAVITDEYKVPSKKFKVLGNTDRHSIKKNLIGALLFDSGETAEATRLKRTARRRYTRRKNRICYLQEIFSNEMAKVDDSFFHRLEESFLVEEDKKHERHPIFGNIVDEVAYHEKYPTIYHLRKKLVDSTDKADLRLIYLALAHMIKFRGHFLIEGDLNPDNSDVDKLFIQLVQTYNQLFEENPINASGVDAKAILSARLSKSRRLENLIAQLPGEKKNGLFGNLIALSLGLTPNFKSNFDLAEDAKLQLSKDTYDDDLDNLLAQIGDQYADLFLAAKNLSDAILLSDILRVNTEITKAPLSASMIKRYDEHHQDLTLLKALVRQQLPEKYKEIFFDQSKNGYAGYIDGGASQEEFYKFIKPILEKMDGTEELLVKLNREDLLRKQRTFDNGSIPHQIHLGELHAILRRQEDFYPFLKDNREKIEKILTFRIPYYVGPLARGNSRFAWMTRKSEETITPWNFEEVVDKGASAQSFIERMTNFDKNLPNEKVLPKHSLLYEYFTVYNELTKVKYVTEGMRKPAFLSGEQKKAIVDLLFKTNRKVTVKQLKEDYFKKIECFDSVEISGVEDRFNASLGTYHDLLKIIKDKDFLDNEENEDILEDIVLTLTLFEDREMIEERLKTYAHLFDDKVMKQLKRRRYTGWGRLSRKLINGIRDKQSGKTILDFLKSDGFANRNFMQLIHDDSLTFKEDIQKAQVSGQGDSLHEHIANLAGSPAIKKGILQTVKVVDELVKVMGRHKPENIVIEMARENQTTQKGQKNSRERMKRIEEGIKELGSQILKEHPVENTQLQNEKLYLYYLQNGRDMYVDQELDINRLSDYDVDHIVPQSFLKDDSIDNKVLTRSDKARGKSDNVPSEEVVKKMKNYWRQLLNAKLITQRKFDNLTKAERGGLSELDKAGFIKRQLVETRQITKHVAQILDSRMNTKYDENDKLIREVKVITLKSKLVSDFRKDFQFYKVREINNYHHAHDAYLNAVVGTALIKKYPKLESEFVYGDYKVYDVRKMIAKSEQEIGKATAKYFFYSNIMNFFKTEITLANGEIRKRPLIETNGETGEIVWDKGRDFATVRKVLSMPQVNIVKKTEVQTGGFSKESILPKRNSDKLIARKKDWDPKKYGGFDSPTVAYSVLVVAKVEKGKSKKLKSVKELLGITIMERSSFEKNPIDFLEAKGYKEVKKDLIIKLPKYSLFELENGRKRMLASAGELQKGNELALPSKYVNFLYLASHYEKLKGSPEDNEQKQLFVEQHKHYLDEIIEQISEFSKRVILADANLDKVLSAYNKHRDKPIREQAENIIHLFTLTNLGAPAAFKYFDTTIDRKRYTSTKEVLDATLIHQSITGLYETRIDLSQLGGDGGPAPEAAAKGGGGGMNPLQLLQPLPAEIKGTKLLAHWNSGATITCIPESFLEDEQPIKKTLIKTIHGEKQQNVYYVTFKVKGRKVEAEVIASPYEYILLSPTDVPWLTQQPLQLTILVPLQEYQEKILSKTALPEDQKQQLKTLFVKYDNLWQHWENQVGHRKIRPHNIATGDYPPRPQKQYPINPKAKPSIQIVIDDLLKQGVLTPQNSTMNTPVYPVPKPDGRWRMVLDYREVNKTIPLTAAQNQHSAGILATIVRQKYKTTLDLANGFWAHPITPESYWLTAFTWQGKQYCWTRLPQGFLNSPALFNADVVDLLKEIPNVQVYVDDIYLSHDDPKEHVQQLEKVFQILLQAGYVVSLKKSEIGQKTVEFLGFNITKEGRGLTDTFKTKLLNITPPKDLKQLQSILGKLNFARNFIPNFAELVQPLYNLIAPAKGKYIEWSEENTKQLNMVIEALNTASNLEERLPEQRLVIKVNTSPSAGYVRYYNETGKKPIMYLNYVFSKAELKFSMLEKLLTTMHKALIKAMDLAMGQEILVYSPIVSMTKIQKTPLPERKALPIRWITWMTYLEDPRIQFHYDKTLPELKHIPDVYTSSQSPVKHPSQYEGVFYTDGSAIKSPDPTKSNNAGMGIVHATYKPEYQVLNQWSIPLGNHTAQMAEIAAVEFACKKALKIPGPVLVITDSFYVAESANKELPYWKSNGFVNNKKKPLKHISKWKSIAECLSMKPDITIQHEKGISLQIPVFILKGNALADKLATQGSYVVNAGKRTADGSEFEKRTADGSEFESPKKKAKVE

SEQ ID NO: 7554 - protein, 2094 aa, synthetic construct
MPAAKRVKLDGGDKKYSIGLDIGTNSVGWAVITDEYKVPSKKFKVLGNTDRHSIKKNLIGALLFDSGETAEATRLKRTARRRYTRRKNRICYLQEIFSNEMAKVDDSFFHRLEESFLVEEDKKHERHPIFGNIVDEVAYHEKYPTIYHLRKKLVDSTDKADLRLIYLALAHMIKFRGHFLIEGDLNPDNSDVDKLFIQLVQTYNQLFEENPINASGVDAKAILSARLSKSRRLENLIAQLPGEKKNGLFGNLIALSLGLTPNFKSNFDLAEDAKLQLSKDTYDDDLDNLLAQIGDQYADLFLAAKNLSDAILLSDILRVNTEITKAPLSASMIKRYDEHHQDLTLLKALVRQQLPEKYKEIFFDQSKNGYAGYIDGGASQEEFYKFIKPILEKMDGTEELLVKLNREDLLRKQRTFDNGSIPHQIHLGELHAILRRQEDFYPFLKDNREKIEKILTFRIPYYVGPLARGNSRFAWMTRKSEETITPWNFEEVVDKGASAQSFIERMTNFDKNLPNEKVLPKHSLLYEYFTVYNELTKVKYVTEGMRKPAFLSGEQKKAIVDLLFKTNRKVTVKQLKEDYFKKIECFDSVEISGVEDRFNASLGTYHDLLKIIKDKDFLDNEENEDILEDIVLTLTLFEDREMIEERLKTYAHLFDDKVMKQLKRRRYTGWGRLSRKLINGIRDKQSGKTILDFLKSDGFANRNFMQLIHDDSLTFKEDIQKAQVSGQGDSLHEHIANLAGSPAIKKGILQTVKVVDELVKVMGRHKPENIVIEMARENQTTQKGQKNSRERMKRIEEGIKELGSQILKEHPVENTQLQNEKLYLYYLQNGRDMYVDQELDINRLSDYDVDHIVPQSFLKDDSIDNKVLTRSDKARGKSDNVPSEEVVKKMKNYWRQLLNAKLITQRKFDNLTKAERGGLSELDKAGFIKRQLVETRQITKHVAQILDSRMNTKYDENDKLIREVKVITLKSKLVSDFRKDFQFYKVREINNYHHAHDAYLNAVVGTALIKKYPKLESEFVYGDYKVYDVRKMIAKSEQEIGKATAKYFFYSNIMNFFKTEITLANGEIRKRPLIETNGETGEIVWDKGRDFATVRKVLSMPQVNIVKKTEVQTGGFSKESILPKRNSDKLIARKKDWDPKKYGGFDSPTVAYSVLVVAKVEKGKSKKLKSVKELLGITIMERSSFEKNPIDFLEAKGYKEVKKDLIIKLPKYSLFELENGRKRMLASAGELQKGNELALPSKYVNFLYLASHYEKLKGSPEDNEQKQLFVEQHKHYLDEIIEQISEFSKRVILADANLDKVLSAYNKHRDKPIREQAENIIHLFTLTNLGAPAAFKYFDTTIDRKRYTSTKEVLDATLIHQSITGLYETRIDLSQLGGDGGPAPEAAAKGGGGGVLNLEEEYRLHEKPVPSSIDPSWLQLFPTVWAERAGMGLANQVPPVVVELRSGASPVAVRQYPMSKEAREGIRPHIQKFLDLGVLVPCRSPWNTPLLPVKKPGTNDYRPVQDLREINKRVQDIHPTVPNPYNLLSSLPPSYTWYSVLDLKDAFFCLRLHPNSQPLFAFEWKDPEKGNTGQLTWTRLPQGFKNSPTLFNEALHRDLAPFRALNPQVVLLQYVDDLLVAAPTYEDCKKGTQKLLQELSKLGYRVSAKKAQLCQREVTYLGYLLKEGKRWLTPARKATVMKIPVPTTPRQVREFLGKAGFCRLFIPGFASLAAPLYPLTKPSIPFIWTEEHQQAFDHIKKALLSAPALALPDLTKPFTLYIDERAGVARGVLTQTLGPWRRPVAYLSKKLDPVASGWPTCLKAVAAVALLLKDADKLTLGQNVTVIASHSLESIVRQPPDRWMTNARMTHYQSLLLNERVSFAPPAVLNPATLLPVESEATPVHRCSEILAEETGTRRDLEDQPLPGVPTWYTDGSSFITEGKRRAGAPIVDGKRTVWASSLPEGTSAQKAELVALTQALRLAEGKNINIYTDSRYAFATAHIHGAIYKQRGWLTSAGKDIKNKEEILALLEAIHLPRRVAIIHCPGHQRGSNPVATGNRRADEAAKQAALSTRVLAGTTKPAGKRTADGSEFEKRTADGSEFESPKKKAKVE

SEQ ID NO: 7555 - protein, 2127 aa, synthetic construct; identical to SEQ ID NO: 4537

SEQ ID NO: 7556 - protein, 2218 aa, synthetic construct
MPAAKRVKLDGGDKKYSIGLDIGTNSVGWAVITDEYKVPSKKFKVLGNTDRHSIKKNLIGALLFDSGETAEATRLKRTARRRYTRRKNRICYLQEIFSNEMAKVDDSFFHRLEESFLVEEDKKHERHPIFGNIVDEVAYHEKYPTIYHLRKKLVDSTDKADLRLIYLALAHMIKFRGHFLIEGDLNPDNSDVDKLFIQLVQTYNQLFEENPINASGVDAKAILSARLSKSRRLENLIAQLPGEKKNGLFGNLIALSLGLTPNFKSNFDLAEDAKLQLSKDTYDDDLDNLLAQIGDQYADLFLAAKNLSDAILLSDILRVNTEITKAPLSASMIKRYDEHHQDLTLLKALVRQQLPEKYKEIFFDQSKNGYAGYIDGGASQEEFYKFIKPILEKMDGTEELLVKLNREDLLRKQRTFDNGSIPHQIHLGELHAILRRQEDFYPFLKDNREKIEKILTFRIPYYVGPLARGNSRFAWMTRKSEETITPWNFEEVVDKGASAQSFIERMTNFDKNLPNEKVLPKHSLLYEYFTVYNELTKVKYVTEGMRKPAFLSGEQKKAIVDLLFKTNRKVTVKQLKEDYFKKIECFDSVEISGVEDRFNASLGTYHDLLKIIKDKDFLDNEENEDILEDIVLTLTLFEDREMIEERLKTYAHLFDDKVMKQLKRRRYTGWGRLSRKLINGIRDKQSGKTILDFLKSDGFANRNFMQLIHDDSLTFKEDIQKAQVSGQGDSLHEHIANLAGSPAIKKGILQTVKVVDELVKVMGRHKPENIVIEMARENQTTQKGQKNSRERMKRIEEGIKELGSQILKEHPVENTQLQNEKLYLYYLQNGRDMYVDQELDINRLSDYDVDHIVPQSFLKDDSIDNKVLTRSDKARGKSDNVPSEEVVKKMKNYWRQLLNAKLITQRKFDNLTKAERGGLSELDKAGFIKRQLVETRQITKHVAQILDSRMNTKYDENDKLIREVKVITLKSKLVSDFRKDFQFYKVREINNYHHAHDAYLNAVVGTALIKKYPKLESEFVYGDYKVYDVRKMIAKSEQEIGKATAKYFFYSNIMNFFKTEITLANGEIRKRPLIETNGETGEIVWDKGRDFATVRKVLSMPQVNIVKKTEVQTGGFSKESILPKRNSDKLIARKKDWDPKKYGGFDSPTVAYSVLVVAKVEKGKSKKLKSVKELLGITIMERSSFEKNPIDFLEAKGYKEVKKDLIIKLPKYSLFELENGRKRMLASAGELQKGNELALPSKYVNFLYLASHYEKLKGSPEDNEQKQLFVEQHKHYLDEIIEQISEFSKRVILADANLDKVLSAYNKHRDKPIREQAENIIHLFTLTNLGAPAAFKYFDTTIDRKRYTSTKEVLDATLIHQSITGLYETRIDLSQLGGDGGPAPEAAAKGGGGGTLGDQGSRGSDPLPEPRVTLTVEGIPTEFLVNTGAEHSVLTKPMGKMGSKRTVVAGATGSKVYPWTTKRLLKIGQKQVTHSFLVIPECPAPLLGRDLLTKLKAQIQFSTEGPQVTWEDRPAMCLVLNLEEEYRLHEKPVPPSIDPSWLQLFPMVWAEKAGMGLANQVPPVVVELKSDASPVAVRQYPMSKEAREGIRPHIQRFLDLGILVPCQSPWNTPLLPVKKPGTNDYRPVQDLREVNKRVQDIHPTVPNPYNLLSSLPPSHTWYSVLDLKDAFFCLKLHPNSQPLFAFEWRDPEKGNTGQLTWTRLPQGFKNSPTLFNEALHRDLASFRALNPQVVMLQYVDDLLVAAPTYRDCKEGTRRLLQELSKLGYRVSAKKAQLCREEVTYLGYLLKGGKRWLTPARKATVMKIPTPTTPRQVREFLGTAGFCRLWIPGFASLAAPLYPLTRPKVPFTWTEAHQEAFGRIKEALLSAPALALPDLTKPFALYVDEKEGVARGVLTQTLGPWRRPVAYLSKKLDPVASGWPTCLKAIAAVALLLKDADKLTLGQNVLVIAPHNLESIVRQPPDRWMTNARMTHYQSLLLNERVSFAPPAILNPATLLPVESDDTPIHICSEILAEETGTRPDLRDQPLPGVPAWYTDGSSFIMDGRRQAGAAIVDNKRTVWASNLPEGTSAQKAELIALTQALRLAEGKSINIYTDSRYAFATAHVHGAIYKQRGWLTSAGKDIKNKEEILALLEAIHLPKRVAIIHCPGHQRGTDPVATGNRKADEAAKQAAQSTRILTETTKNAGKRTADGSEFEKRTADGSEFESPKKKAKVE

SEQ ID NO: 7557 - protein, 2218 aa, synthetic construct
MPAAKRVKLDGGDKKYSIGLDIGTNSVGWAVITDEYKVPSKKFKVLGNTDRHSIKKNLIGALLFDSGETAEATRLKRTARRRYTRRKNRICYLQEIFSNEMAKVDDSFFHRLEESFLVEEDKKHERHPIFGNIVDEVAYHEKYPTIYHLRKKLVDSTDKADLRLIYLALAHMIKFRGHFLIEGDLNPDNSDVDKLFIQLVQTYNQLFEENPINASGVDAKAILSARLSKSRRLENLIAQLPGEKKNGLFGNLIALSLGLTPNFKSNFDLAEDAKLQLSKDTYDDDLDNLLAQIGDQYADLFLAAKNLSDAILLSDILRVNTEITKAPLSASMIKRYDEHHQDLTLLKALVRQQLPEKYKEIFFDQSKNGYAGYIDGGASQEEFYKFIKPILEKMDGTEELLVKLNREDLLRKQRTFDNGSIPHQIHLGELHAILRRQEDFYPFLKDNREKIEKILTFRIPYYVGPLARGNSRFAWMTRKSEETITPWNFEEVVDKGASAQSFIERMTNFDKNLPNEKVLPKHSLLYEYFTVYNELTKVKYVTEGMRKPAFLSGEQKKAIVDLLFKTNRKVTVKQLKEDYFKKIECFDSVEISGVEDRFNASLGTYHDLLKIIKDKDFLDNEENEDILEDIVLTLTLFEDREMIEERLKTYAHLFDDKVMKQLKRRRYTGWGRLSRKLINGIRDKQSGKTILDFLKSDGFANRNFMQLIHDDSLTFKEDIQKAQVSGQGDSLHEHIANLAGSPAIKKGILQTVKVVDELVKVMGRHKPENIVIEMARENQTTQKGQKNSRERMKRIEEGIKELGSQILKEHPVENTQLQNEKLYLYYLQNGRDMYVDQELDINRLSDYDVDHIVPQSFLKDDSIDNKVLTRSDKARGKSDNVPSEEVVKKMKNYWRQLLNAKLITQRKFDNLTKAERGGLSELDKAGFIKRQLVETRQITKHVAQILDSRMNTKYDENDKLIREVKVITLKSKLVSDFRKDFQFYKVREINNYHHAHDAYLNAVVGTALIKKYPKLESEFVYGDYKVYDVRKMIAKSEQEIGKATAKYFFYSNIMNFFKTEITLANGEIRKRPLIETNGETGEIVWDKGRDFATVRKVLSMPQVNIVKKTEVQTGGFSKESILPKRNSDKLIARKKDWDPKKYGGFDSPTVAYSVLVVAKVEKGKSKKLKSVKELLGITIMERSSFEKNPIDFLEAKGYKEVKKDLIIKLPKYSLFELENGRKRMLASAGELQKGNELALPSKYVNFLYLASHYEKLKGSPEDNEQKQLFVEQHKHYLDEIIEQISEFSKRVILADANLDKVLSAYNKHRDKPIREQAENIIHLFTLTNLGAPAAFKYFDTTIDRKRYTSTKEVLDATLIHQSITGLYETRIDLSQLGGDGGPAPEAAAKGGGGGTLGDQGSRGSDPLPEPRVTLTVEGIPTEFLVNTGAEHSVLTKPMGKMGSKRTVVAGATGSKVYPWTTKRLLKIGQKQVTHSFLVIPECPAPLLGRDLLTKLKAQIQFSTEGPQVTWEDRPAMCLVLNLEEEYRLHEKPVPPSIDPSWLQLFPMVWAEKAGMGLANQVPPVVVELKSDASPVAVRQYPMSKEAREGIRPHIQRFLDLGILVPCQSPWNTPLLPVKKPGTNDYRPVQDLREVNKRVQDIHPTVPNPYNLLSSLPPSHTWYSVLDLKDAFFCLKLHPNSQPLFAFEWRDPEKGNTGQLTWTRLPQGFKNSPTLFNEALHRDLASFRALNPQVVMLQYVDDLLVAAPTYRDCKEGTRRLLQELSKLGYRVSAKKAQLCREEVTYLGYLLKGGKRWLTPARKATVMKIPTPTTPRQVREFLGKAGFCRLFIPGFASLAAPLYPLTRPKVPFTWTEAHQEAFGRIKEALLSAPALALPDLTKPFALYVDEKEGVARGVLTQTLGPWRRPVAYLSKKLDPVASGWPTCLKAIAAVALLLKDADKLTLGQNVLVIAPHNLESIVRQPPDRWMTNARMTHYQSLLLNERVSFAPPAILNPATLLPVESDDTPIHICSEILAEETGTRPDLRDQPLPGVPAWYTDGSSFIMDGRRQAGAAIVDNKRTVWASNLPEGTSAQKAELIALTQALRLAEGKSINIYTDSRYAFATAHVHGAIYKQRGWLTSAGKDIKNKEEILALLEAIHLPKRVAIIHCPGHQRGTDPVATGNRKADEAAKQAAQSTRILTETTKNAGKRTADGSEFEKRTADGSEFESPKKKAKVE

SEQ ID NO: 7558 - protein, 2096 aa, synthetic construct
MPAAKRVKLDGGDKKYSIGLDIGTNSVGWAVITDEYKVPSKKFKVLGNTDRHSIKKNLIGALLFDSGETAEATRLKRTARRRYTRRKNRICYLQEIFSNEMAKVDDSFFHRLEESFLVEEDKKHERHPIFGNIVDEVAYHEKYPTIYHLRKKLVDSTDKADLRLIYLALAHMIKFRGHFLIEGDLNPDNSDVDKLFIQLVQTYNQLFEENPINASGVDAKAILSARLSKSRRLENLIAQLPGEKKNGLFGNLIALSLGLTPNFKSNFDLAEDAKLQLSKDTYDDDLDNLLAQIGDQYADLFLAAKNLSDAILLSDILRVNTEITKAPLSASMIKRYDEHHQDLTLLKALVRQQLPEKYKEIFFDQSKNGYAGYIDGGASQEEFYKFIKPILEKMDGTEELLVKLNREDLLRKQRTFDNGSIPHQIHLGELHAILRRQEDFYPFLKDNREKIEKILTFRIPYYVGPLARGNSRFAWMTRKSEETITPWNFEEVVDKGASAQSFIERMTNFDKNLPNEKVLPKHSLLYEYFTVYNELTKVKYVTEGMRKPAFLSGEQKKAIVDLLFKTNRKVTVKQLKEDYFKKIECFDSVEISGVEDRFNASLGTYHDLLKIIKDKDFLDNEENEDILEDIVLTLTLFEDREMIEERLKTYAHLFDDKVMKQLKRRRYTGWGRLSRKLINGIRDKQSGKTILDFLKSDGFANRNFMQLIHDDSLTFKEDIQKAQVSGQGDSLHEHIANLAGSPAIKKGILQTVKVVDELVKVMGRHKPENIVIEMARENQTTQKGQKNSRERMKRIEEGIKELGSQILKEHPVENTQLQNEKLYLYYLQNGRDMYVDQELDINRLSDYDVDHIVPQSFLKDDSIDNKVLTRSDKARGKSDNVPSEEVVKKMKNYWRQLLNAKLITQRKFDNLTKAERGGLSELDKAGFIKRQLVETRQITKHVAQILDSRMNTKYDENDKLIREVKVITLKSKLVSDFRKDFQFYKVREINNYHHAHDAYLNAVVGTALIKKYPKLESEFVYGDYKVYDVRKMIAKSEQEIGKATAKYFFYSNIMNFFKTEITLANGEIRKRPLIETNGETGEIVWDKGRDFATVRKVLSMPQVNIVKKTEVQTGGFSKESILPKRNSDKLIARKKDWDPKKYGGFDSPTVAYSVLVVAKVEKGKSKKLKSVKELLGITIMERSSFEKNPIDFLEAKGYKEVKKDLIIKLPKYSLFELENGRKRMLASAGELQKGNELALPSKYVNFLYLASHYEKLKGSPEDNEQKQLFVEQHKHYLDEIIEQISEFSKRVILADANLDKVLSAYNKHRDKPIREQAENIIHLFTLTNLGAPAAFKYFDTTIDRKRYTSTKEVLDATLIHQSITGLYETRIDLSQLGGDGGPAPEAAAKGGGGGTLNIEDEYRLHETSKGPDVPLGSTWLSDFPQAWAETGGMGLAVRQAPLIIPLKATSTPVSIKQYPMSQEARLGIKPHIQRLLDQGILVPCQSPWNTPLLPVKKPGTNDYRPVQDLREVNKRVEDIHPTVPNPYNLLSGLPPSHQWYTVLDLKDAFFCLRLHPTSQSLFAFEWRDPEMGISGQLTWTRLPQGFKNSPTLFNEALHRDLADFRIQHPDLILLQYVDDLLLAATSELDCQQGTRALLQTLGDLGYRASAKKAQICQKQVKYLGYLLKEGQRWLTEARKETVMGQPTPKTPRQLREFLGKAGFCRLFIPGFAEMAAPLYPLTKPGTLFEWGPDQQKAYQEIKQALLTAPALGLPDLTKPFELFVDEKQGYAKGVLTQKLGPWRRPVAYLSKKLDPVAAGWPPCLRMVAAIAVLTKDAGKLTMGQPLVILAPHAVEALVKQPPDRWLSNARMTHYQALLLDTDRVQFGPIVALNPATLLPLPEEGLQHDCLDILAEAHGTRPDLTDQPLPDADHTWYTDGSSFLQEGQRKAGAAVTTETEVVWAKALPAGTSAQRAELIALTQALKMAEGKKLNVYTDSRYAFATAHIHGEIYRRRGWLTSEGKEIKNKDEILALLKALFLPKRLSIIHCPGHQKGNRAEARGNRMADQAAREVATRETPETSTLLAGKRTADGSEFEKRTADGSEFESPKKKAKVE

SEQ ID NO: 7559 - protein, 2096 aa, synthetic construct
MPAAKRVKLDGGDKKYSIGLDIGTNSVGWAVITDEYKVPSKKFKVLGNTDRHSIKKNLIGALLFDSGETAEATRLKRTARRRYTRRKNRICYLQEIFSNEMAKVDDSFFHRLEESFLVEEDKKHERHPIFGNIVDEVAYHEKYPTIYHLRKKLVDSTDKADLRLIYLALAHMIKFRGHFLIEGDLNPDNSDVDKLFIQLVQTYNQLFEENPINASGVDAKAILSARLSKSRRLENLIAQLPGEKKNGLFGNLIALSLGLTPNFKSNFDLAEDAKLQLSKDTYDDDLDNLLAQIGDQYADLFLAAKNLSDAILLSDILRVNTEITKAPLSASMIKRYDEHHQDLTLLKALVRQQLPEKYKEIFFDQSKNGYAGYIDGGASQEEFYKFIKPILEKMDGTEELLVKLNREDLLRKQRTFDNGSIPHQIHLGELHAILRRQEDFYPFLKDNREKIEKILTFRIPYYVGPLARGNSRFAWMTRKSEETITPWNFEEVVDKGASAQSFIERMTNFDKNLPNEKVLPKHSLLYEYFTVYNELTKVKYVTEGMRKPAFLSGEQKKAIVDLLFKTNRKVTVKQLKEDYFKKIECFDSVEISGVEDRFNASLGTYHDLLKIIKDKDFLDNEENEDILEDIVLTLTLFEDREMIEERLKTYAHLFDDKVMKQLKRRRYTGWGRLSRKLINGIRDKQSGKTILDFLKSDGFANRNFMQLIHDDSLTFKEDIQKAQVSGQGDSLHEHIANLAGSPAIKKGILQTVKVVDELVKVMGRHKPENIVIEMARENQTTQKGQKNSRERMKRIEEGIKELGSQILKEHPVENTQLQNEKLYLYYLQNGRDMYVDQELDINRLSDYDVDHIVPQSFLKDDSIDNKVLTRSDKARGKSDNVPSEEVVKKMKNYWRQLLNAKLITQRKFDNLTKAERGGLSELDKAGFIKRQLVETRQITKHVAQILDSRMNTKYDENDKLIREVKVITLKSKLVSDFRKDFQFYKVREINNYHHAHDAYLNAVVGTALIKKYPKLESEFVYGDYKVYDVRKMIAKSEQEIGKATAKYFFYSNIMNFFKTEITLANGEIRKRPLIETNGETGEIVWDKGRDFATVRKVLSMPQVNIVKKTEVQTGGFSKESILPKRNSDKLIARKKDWDPKKYGGFDSPTVAYSVLVVAKVEKGKSKKLKSVKELLGITIMERSSFEKNPIDFLEAKGYKEVKKDLIIKLPKYSLFELENGRKRMLASAGELQKGNELALPSKYVNFLYLASHYEKLKGSPEDNEQKQLFVEQHKHYLDEIIEQISEFSKRVILADANLDKVLSAYNKHRDKPIREQAENIIHLFTLTNLGAPAAFKYFDTTIDRKRYTSTKEVLDATLIHQSITGLYETRIDLSQLGGDGGPAPEAAAKGGGGGTLNIEDEHRLHETSKEPDVSLGSTWLSDFPQAWAETGGMGLAVRQAPLIIPLKATSTPVSIKQYPMSQEARLGIKPHIQRLLDQGILVPCQSPWNTPLLPVKKPGTNDYRPVQDLREVNKRVEDIHPTVPNPYNLLSGLPPSHQWYTVLDLKDAFFCLRLHPTSQPLFAFEWRDPEMGISGQLTWTRLPQGFKNSPTLFDEALHRDLADFRIQHPDLILLQYVDDLLLAATSELDCQQGTRALLQTLGNLGYRASAKKAQICQKQVKYLGYLLKEGQRWLTEARKETVMGQPTPKTPRQLREFLGTAGFCRLWIPGFAEMAAPLYPLTKTGTLFNWGPDQQKAYQEIKQALLTAPALGLPDLTKPFELFVDEKQGYAKGVLTQKLGPWRRPVAYLSKKLDPVAAGWPPCLRMVAAIAVLTKDAGKLTMGQPLVILAPHAVEALVKQPPDRWLSNARMTHYQALLLDTDRVQFGPVVALNPATLLPLPEEGLQHNCLDILAEAHGTRPDLTDQPLPDADHTWYTDGSSLLQEGQRKAGAAVTTETEVIWAKALPAGTSAQRAELIALTQALKMAEGKKLNVYTDSRYAFATAHIHGEIYRRRGLLTSEGKEIKNKDEILALLKALFLPKRLSIIHCPGHQKGHSAEARGNRMADQAARKAAITETPDTSTLLAGKRTADGSEFEKRTADGSEFESPKKKAKVE

SEQ ID NO: 7560 - protein, 2096 aa, synthetic construct; identical to SEQ ID NO: 7559

SEQ ID NO: 7561 - protein, 2116 aa, synthetic construct
MPAAKRVKLDGGDKKYSIGLDIGTNSVGWAVITDEYKVPSKKFKVLGNTDRHSIKKNLIGALLFDSGETAEATRLKRTARRRYTRRKNRICYLQEIFSNEMAKVDDSFFHRLEESFLVEEDKKHERHPIFGNIVDEVAYHEKYPTIYHLRKKLVDSTDKADLRLIYLALAHMIKFRGHFLIEGDLNPDNSDVDKLFIQLVQTYNQLFEENPINASGVDAKAILSARLSKSRRLENLIAQLPGEKKNGLFGNLIALSLGLTPNFKSNFDLAEDAKLQLSKDTYDDDLDNLLAQIGDQYADLFLAAKNLSDAILLSDILRVNTEITKAPLSASMIKRYDEHHQDLTLLKALVRQQLPEKYKEIFFDQSKNGYAGYIDGGASQEEFYKFIKPILEKMDGTEELLVKLNREDLLRKQRTFDNGSIPHQIHLGELHAILRRQEDFYPFLKDNREKIEKILTFRIPYYVGPLARGNSRFAWMTRKSEETITPWNFEEVVDKGASAQSFIERMTNFDKNLPNEKVLPKHSLLYEYFTVYNELTKVKYVTEGMRKPAFLSGEQKKAIVDLLFKTNRKVTVKQLKEDYFKKIECFDSVEISGVEDRFNASLGTYHDLLKIIKDKDFLDNEENEDILEDIVLTLTLFEDREMIEERLKTYAHLFDDKVMKQLKRRRYTGWGRLSRKLINGIRDKQSGKTILDFLKSDGFANRNFMQLIHDDSLTFKEDIQKAQVSGQGDSLHEHIANLAGSPAIKKGILQTVKVVDELVKVMGRHKPENIVIEMARENQTTQKGQKNSRERMKRIEEGIKELGSQILKEHPVENTQLQNEKLYLYYLQNGRDMYVDQELDINRLSDYDVDHIVPQSFLKDDSIDNKVLTRSDKARGKSDNVPSEEVVKKMKNYWRQLLNAKLITQRKFDNLTKAERGGLSELDKAGFIKRQLVETRQITKHVAQILDSRMNTKYDENDKLIREVKVITLKSKLVSDFRKDFQFYKVREINNYHHAHDAYLNAVVGTALIKKYPKLESEFVYGDYKVYDVRKMIAKSEQEIGKATAKYFFYSNIMNFFKTEITLANGEIRKRPLIETNGETGEIVWDKGRDFATVRKVLSMPQVNIVKKTEVQTGGFSKESILPKRNSDKLIARKKDWDPKKYGGFDSPTVAYSVLVVAKVEKGKSKKLKSVKELLGITIMERSSFEKNPIDFLEAKGYKEVKKDLIIKLPKYSLFELENGRKRMLASAGELQKGNELALPSKYVNFLYLASHYEKLKGSPEDNEQKQLFVEQHKHYLDEIIEQISEFSKRVILADANLDKVLSAYNKHRDKPIREQAENIIHLFTLTNLGAPAAFKYFDTTIDRKRYTSTKEVLDATLIHQSITGLYETRIDLSQLGGDGGPAPEAAAKGGGGGVQEISDSRPMLHIYLNGRRFLGLLDTGADKTCIAGRDWPANWPIHQTESSLQGLGMACGVARSSQPLRWQHEDKSGIIHPFVIPTLPFTLWGRDIMKDIKVRLMTDSPDDSQDLMIGAIESNLFADQISWKSDQPVWLNQWPLKQEKLQALQQLVTEQLQLGHLEESNSPWNTPVFVIKKKSGKWRLLQDLRAVNATMHDMGALQPGLPSPVAVPKGWEIIIIDLQDCFFNIKLHPEDCKRFAFSVPSPNFKRPYQRFQWKVLPQGMKNSPTLCQKFVDKAILTVRDKYQDSYIVHYMDDILLAHPSRSIVDEILTSMIQALNKHGLVVSTEKIQKYDNLKYLGTHIQGDSVSYQKLQIRTDKLRTLNDFQKLLGNINWIRPFLKLTTGELKPLFEILNGDSNPISTRKLTPEACKALQLMNERLSTARVKRLDLSQPWSLCILKTEYTPTACLWQDGVVEWIHLPHISPKVITPYDIFCTQLIIKGRHRSKELFSKDPDYIVVPYTKVQFDLLLQEKEDWPISLLGFLGEVHFHLPKDPLLTFTLQTAIIFPHMTSTTPLEKGIVIFTDGSANGRSVTYIQGREPIIKENTQNTAQQAEIVAVITAFEEVSQPFNLYTDSKYVTGLFPEIETATLSPRTKIYTELKHLQRLIHKRQEKFYIGHIRGHTGLPGPLAQGNAYADSLTRILTAAGKRTADGSEFEKRTADGSEFESPKKKAKVE

SEQ ID NO: 7562 - protein, 2090 aa, synthetic construct
MPAAKRVKLDGGDKKYSIGLDIGTNSVGWAVITDEYKVPSKKFKVLGNTDRHSIKKNLIGALLFDSGETAEATRLKRTARRRYTRRKNRICYLQEIFSNEMAKVDDSFFHRLEESFLVEEDKKHERHPIFGNIVDEVAYHEKYPTIYHLRKKLVDSTDKADLRLIYLALAHMIKFRGHFLIEGDLNPDNSDVDKLFIQLVQTYNQLFEENPINASGVDAKAILSARLSKSRRLENLIAQLPGEKKNGLFGNLIALSLGLTPNFKSNFDLAEDAKLQLSKDTYDDDLDNLLAQIGDQYADLFLAAKNLSDAILLSDILRVNTEITKAPLSASMIKRYDEHHQDLTLLKALVRQQLPEKYKEIFFDQSKNGYAGYIDGGASQEEFYKFIKPILEKMDGTEELLVKLNREDLLRKQRTFDNGSIPHQIHLGELHAILRRQEDFYPFLKDNREKIEKILTFRIPYYVGPLARGNSRFAWMTRKSEETITPWNFEEVVDKGASAQSFIERMTNFDKNLPNEKVLPKHSLLYEYFTVYNELTKVKYVTEGMRKPAFLSGEQKKAIVDLLFKTNRKVTVKQLKEDYFKKIECFDSVEISGVEDRFNASLGTYHDLLKIIKDKDFLDNEENEDILEDIVLTLTLFEDREMIEERLKTYAHLFDDKVMKQLKRRRYTGWGRLSRKLINGIRDKQSGKTILDFLKSDGFANRNFMQLIHDDSLTFKEDIQKAQVSGQGDSLHEHIANLAGSPAIKKGILQTVKVVDELVKVMGRHKPENIVIEMARENQTTQKGQKNSRERMKRIEEGIKELGSQILKEHPVENTQLQNEKLYLYYLQNGRDMYVDQELDINRLSDYDVDHIVPQSFLKDDSIDNKVLTRSDKARGKSDNVPSEEVVKKMKNYWRQLLNAKLITQRKFDNLTKAERGGLSELDKAGFIKRQLVETRQITKHVAQILDSRMNTKYDENDKLIREVKVITLKSKLVSDFRKDFQFYKVREINNYHHAHDAYLNAVVGTALIKKYPKLESEFVYGDYKVYDVRKMIAKSEQEIGKATAKYFFYSNIMNFFKTEITLANGEIRKRPLIETNGETGEIVWDKGRDFATVRKVLSMPQVNIVKKTEVQTGGFSKESILPKRNSDKLIARKKDWDPKKYGGFDSPTVAYSVLVVAKVEKGKSKKLKSVKELLGITIMERSSFEKNPIDFLEAKGYKEVKKDLIIKLPKYSLFELENGRKRMLASAGELQKGNELALPSKYVNFLYLASHYEKLKGSPEDNEQKQLFVEQHKHYLDEIIEQISEFSKRVILADANLDKVLSAYNKHRDKPIREQAENIIHLFTLTNLGAPAAFKYFDTTIDRKRYTSTKEVLDATLIHQSITGLYETRIDLSQLGGDGGPAPEAAAKGGGGGTLQLDDEYRLYSPLVKPDQNIQFWLEQFPQAWAETAGMGLAKQVPPQVIQLKASATPVSVRQYPLSKEAQEGIRPHVQRLIQQGILVPVQSPWNTPLLPVRKPGTNDYRPVQDLREVNKRVQDIHPTVPNPYNLLCALPPQRSWYTVLDLKDAFFCLRLHPTSQPLFAFEWRDPGTGRTGQLTWTRLPQGFKNSPTIFDEALHRDLANFRIQHPQVTLLQYVDDLLLAGATKQDCLEGTKALLLELSDLGYRASAKKAQICRREVTYLGYSLRDGQRWLTEARKKTVVQIPAPTTAKQVREFLGTAGFCRLWIPGFATLAAPLYPLTKEKGEFSWAPEHQKAFDAIKKALLSAPALALPDVTKPFTLYVDERKGVARGVLTQTLGPWRRPVAYLSKKLDPVASGWPVCLKAIAAVAILVKDADKLTLGQNITVIAPHALENIVRQPPDRWMTNARMTHYQSLLLTERVTFAPPAALNPATLLPEETDEPVTHDCHQLLIEETGVRKDLTDIPLTGEVLTWFTDGSSYVVEGKRMAGAAVVDGTRTIWASSLPEGTSAQKAELMALTQALRLAEGKSINIYTDSRYAFATAHVHGAIYKQRGLLTSAGREIKNKEEILSLLEALHLPKRLAIIHCPGHQKAKDPISRGNQMADRVAKQAAQGVNLLAGKRTADGSEFEKRTADGSEFESPKKKAKVE

SEQ ID NO: 7563 - protein, 2176 aa, synthetic construct
MPAAKRVKLDGGDKKYSIGLDIGTNSVGWAVITDEYKVPSKKFKVLGNTDRHSIKKNLIGALLFDSGETAEATRLKRTARRRYTRRKNRICYLQEIFSNEMAKVDDSFFHRLEESFLVEEDKKHERHPIFGNIVDEVAYHEKYPTIYHLRKKLVDSTDKADLRLIYLALAHMIKFRGHFLIEGDLNPDNSDVDKLFIQLVQTYNQLFEENPINASGVDAKAILSARLSKSRRLENLIAQLPGEKKNGLFGNLIALSLGLTPNFKSNFDLAEDAKLQLSKDTYDDDLDNLLAQIGDQYADLFLAAKNLSDAILLSDILRVNTEITKAPLSASMIKRYDEHHQDLTLLKALVRQQLPEKYKEIFFDQSKNGYAGYIDGGASQEEFYKFIKPILEKMDGTEELLVKLNREDLLRKQRTFDNGSIPHQIHLGELHAILRRQEDFYPFLKDNREKIEKILTFRIPYYVGPLARGNSRFAWMTRKSEETITPWNFEEVVDKGASAQSFIERMTNFDKNLPNEKVLPKHSLLYEYFTVYNELTKVKYVTEGMRKPAFLSGEQKKAIVDLLFKTNRKVTVKQLKEDYFKKIECFDSVEISGVEDRFNASLGTYHDLLKIIKDKDFLDNEENEDILEDIVLTLTLFEDREMIEERLKTYAHLFDDKVMKQLKRRRYTGWGRLSRKLINGIRDKQSGKTILDFLKSDGFANRNFMQLIHDDSLTFKEDIQKAQVSGQGDSLHEHIANLAGSPAIKKGILQTVKVVDELVKVMGRHKPENIVIEMARENQTTQKGQKNSRERMKRIEEGIKELGSQILKEHPVENTQLQNEKLYLYYLQNGRDMYVDQELDINRLSDYDVDHIVPQSFLKDDSIDNKVLTRSDKARGKSDNVPSEEVVKKMKNYWRQLLNAKLITQRKFDNLTKAERGGLSELDKAGFIKRQLVETRQITKHVAQILDSRMNTKYDENDKLIREVKVITLKSKLVSDFRKDFQFYKVREINNYHHAHDAYLNAVVGTALIKKYPKLESEFVYGDYKVYDVRKMIAKSEQEIGKATAKYFFYSNIMNFFKTEITLANGEIRKRPLIETNGETGEIVWDKGRDFATVRKVLSMPQVNIVKKTEVQTGGFSKESILPKRNSDKLIARKKDWDPKKYGGFDSPTVAYSVLVVAKVEKGKSKKLKSVKELLGITIMERSSFEKNPIDFLEAKGYKEVKKDLIIKLPKYSLFELENGRKRMLASAGELQKGNELALPSKYVNFLYLASHYEKLKGSPEDNEQKQLFVEQHKHYLDEIIEQISEFSKRVILADANLDKVLSAYNKHRDKPIREQAENIIHLFTLTNLGAPAAFKYFDTTIDRKRYTSTKEVLDATLIHQSITGLYETRIDLSQLGGDGGPAPEAAAKGGGGGMDPLQLLQPLEAEIKGTKLKAHWNSGATITCVPEAFLEDERPIQTMLIKTIHGEKQQDVYYLTFKVQGRKVEAEVLASPYDYILLNPSDVPWLMKKPLQLTVLVPLHEYQERLLQQTALPKEQKELLQKLFLKYDALWQHWENQVGHRRIKPHNIATGTLAPRPQKQYPINPKAKPSIQIVIDDLLKQGVLIQQNSTMNTPVYPVPKPDGKWRMVLDYREVNKTIPLIAAQNQHSAGILSSIYRGKYKTTLDLTNGFWAHPITPESYWLTAFTWQGKQYCWTRLPQGFLNSPALFTADVVDLLKEIPNVQAYVDDIYISHDDPQEHLEQLEKIFSILLNAGYVVSLKKSEIAQREVEFLGFNITKEGRGLTDTFKQKLLNITPPKDLKQLQSILGLLNFARNFIPNYSELVKPLYTIVANANGKFISWTEDNSNQLQHIISVLNQADNLEERNPETRLIIKVNSSPSAGYIRYYNEGSKRPIMYVNYIFSKAEAKFTQTEKLLTTMHKGLIKAMDLAMGQEILVYSPIVSMTKIQRTPLPERKALPVRWITWMTYLEDPRIQFHYDKSLPELQQIPNVTEDVIAKTKHPSEFAMVFYTDGSAIKHPDVNKSHSAGMGIAQVQFIPEYKIVHQWSIPLGDHTAQLAEIAAVEFACKKALKISGPVLIVTDSFYVAESANKELPYWKSNGFLNNKKKPLRHVSKWKSIAECLQLKPDIIIMHEKGHQQPMTTLHTEGNNLADKLATQGSYVVHAGKRTADGSEFEKRTADGSEFESPKKKAKVE

SEQ ID NO: 7564 - protein, 2176 aa, synthetic construct
MPAAKRVKLDGGDKKYSIGLDIGTNSVGWAVITDEYKVPSKKFKVLGNTDRHSIKKNLIGALLFDSGETAEATRLKRTARRRYTRRKNRICYLQEIFSNEMAKVDDSFFHRLEESFLVEEDKKHERHPIFGNIVDEVAYHEKYPTIYHLRKKLVDSTDKADLRLIYLALAHMIKFRGHFLIEGDLNPDNSDVDKLFIQLVQTYNQLFEENPINASGVDAKAILSARLSKSRRLENLIAQLPGEKKNGLFGNLIALSLGLTPNFKSNFDLAEDAKLQLSKDTYDDDLDNLLAQIGDQYADLFLAAKNLSDAILLSDILRVNTEITKAPLSASMIKRYDEHHQDLTLLKALVRQQLPEKYKEIFFDQSKNGYAGYIDGGASQEEFYKFIKPILEKMDGTEELLVKLNREDLLRKQRTFDNGSIPHQIHLGELHAILRRQEDFYPFLKDNREKIEKILTFRIPYYVGPLARGNSRFAWMTRKSEETITPWNFEEVVDKGASAQSFIERMTNFDKNLPNEKVLPKHSLLYEYFTVYNELTKVKYVTEGMRKPAFLSGEQKKAIVDLLFKTNRKVTVKQLKEDYFKKIECFDSVEISGVEDRFNASLGTYHDLLKIIKDKDFLDNEENEDILEDIVLTLTLFEDREMIEERLKTYAHLFDDKVMKQLKRRRYTGWGRLSRKLINGIRDKQSGKTILDFLKSDGFANRNFMQLIHDDSLTFKEDIQKAQVSGQGDSLHEHIANLAGSPAIKKGILQTVKVVDELVKVMGRHKPENIVIEMARENQTTQKGQKNSRERMKRIEEGIKELGSQILKEHPVENTQLQNEKLYLYYLQNGRDMYVDQELDINRLSDYDVDHIVPQSFLKDDSIDNKVLTRSDKARGKSDNVPSEEVVKKMKNYWRQLLNAKLITQRKFDNLTKAERGGLSELDKAGFIKRQLVETRQITKHVAQILDSRMNTKYDENDKLIREVKVITLKSKLVSDFRKDFQFYKVREINNYHHAHDAYLNAVVGTALIKKYPKLESEFVYGDYKVYDVRKMIAKSEQEIGKATAKYFFYSNIMNFFKTEITLANGEIRKRPLIETNGETGEIVWDKGRDFATVRKVLSMPQVNIVKKTEVQTGGFSKESILPKRNSDKLIARKKDWDPKKYGGFDSPTVAYSVLVVAKVEKGKSKKLKSVKELLGITIMERSSFEKNPIDFLEAKGYKEVKKDLIIKLPKYSLFELENGRKRMLASAGELQKGNELALPSKYVNFLYLASHYEKLKGSPEDNEQKQLFVEQHKHYLDEIIEQISEFSKRVILADANLDKVLSAYNKHRDKPIREQAENIIHLFTLTNLGAPAAFKYFDTTIDRKRYTSTKEVLDATLIHQSITGLYETRIDLSQLGGDGGPAPEAAAKGGGGGMDPLQLLQPLEAEIKGTKLKAHWNSGATITCVPEAFLEDERPIQTMLIKTIHGEKQQDVYYLTFKVQGRKVEAEVLASPYDYILLNPSDVPWLMKKPLQLTVLVPLHEYQERLLQQTALPKEQKELLQKLFLKYDALWQHWENQVGHRRIKPHNIATGTLAPRPQKQYPINPKAKPSIQIVIDDLLKQGVLIQQNSTMNTPVYPVPKPDGKWRMVLDYREVNKTIPLIAAQNQHSAGILSSIYRGKYKTTLDLTNGFWAHPITPESYWLTAFTWQGKQYCWTRLPQGFLNSPALFNADVVDLLKEIPNVQAYVDDIYISHDDPQEHLEQLEKIFSILLNAGYVVSLKKSEIAQREVEFLGFNITKEGRGLTDTFKQKLLNITPPKDLKQLQSILGLLNFARNFIPNYSELVKPLYTIVAPANGKFISWTEDNSNQLQHIISVLNQADNLEERNPETRLIIKVNSSPSAGYIRYYNEGSKRPIMYVNYIFSKAEAKFTQTEKLLTTMHKGLIKAMDLAMGQEILVYSPIVSMTKIQRTPLPERKALPVRWITWMTYLEDPRIQFHYDKSLPELQQIPNVTEDVIAKTKHPSEFAMVFYTDGSAIKHPDVNKSHSAGMGIAQVQFIPEYKIVHQWSIPLGDHTAQLAEIAAVEFACKKALKISGPVLIVTDSFYVAESANKELPYWKSNGFLNNKKKPLRHVSKWKSIAECLQLKPDIIIMHEKGHQQPMTTLHTEGNNLADKLATQGSYVVHAGKRTADGSEFEKRTADGSEFESPKKKAKVE

SEQ ID NO: 7565 - protein, 2087 aa, synthetic construct
MPAAKRVKLDGGDKKYSIGLDIGTNSVGWAVITDEYKVPSKKFKVLGNTDRHSIKKNLIGALLFDSGETAEATRLKRTARRRYTRRKNRICYLQEIFSNEMAKVDDSFFHRLEESFLVEEDKKHERHPIFGNIVDEVAYHEKYPTIYHLRKKLVDSTDKADLRLIYLALAHMIKFRGHFLIEGDLNPDNSDVDKLFIQLVQTYNQLFEENPINASGVDAKAILSARLSKSRRLENLIAQLPGEKKNGLFGNLIALSLGLTPNFKSNFDLAEDAKLQLSKDTYDDDLDNLLAQIGDQYADLFLAAKNLSDAILLSDILRVNTEITKAPLSASMIKRYDEHHQDLTLLKALVRQQLPEKYKEIFFDQSKNGYAGYIDGGASQEEFYKFIKPILEKMDGTEELLVKLNREDLLRKQRTFDNGSIPHQIHLGELHAILRRQEDFYPFLKDNREKIEKILTFRIPYYVGPLARGNSRFAWMTRKSEETITPWNFEEVVDKGASAQSFIERMTNFDKNLPNEKVLPKHSLLYEYFTVYNELTKVKYVTEGMRKPAFLSGEQKKAIVDLLFKTNRKVTVKQLKEDYFKKIECFDSVEISGVEDRFNASLGTYHDLLKIIKDKDFLDNEENEDILEDIVLTLTLFEDREMIEERLKTYAHLFDDKVMKQLKRRRYTGWGRLSRKLINGIRDKQSGKTILDFLKSDGFANRNFMQLIHDDSLTFKEDIQKAQVSGQGDSLHEHIANLAGSPAIKKGILQTVKVVDELVKVMGRHKPENIVIEMARENQTTQKGQKNSRERMKRIEEGIKELGSQILKEHPVENTQLQNEKLYLYYLQNGRDMYVDQELDINRLSDYDVDHIVPQSFLKDDSIDNKVLTRSDKARGKSDNVPSEEVVKKMKNYWRQLLNAKLITQRKFDNLTKAERGGLSELDKAGFIKRQLVETRQITKHVAQILDSRMNTKYDENDKLIREVKVITLKSKLVSDFRKDFQFYKVREINNYHHAHDAYLNAVVGTALIKKYPKLESEFVYGDYKVYDVRKMIAKSEQEIGKATAKYFFYSNIMNFFKTEITLANGEIRKRPLIETNGETGEIVWDKGRDFATVRKVLSMPQVNIVKKTEVQTGGFSKESILPKRNSDKLIARKKDWDPKKYGGFDSPTVAYSVLVVAKVEKGKSKKLKSVKELLGITIMERSSFEKNPIDFLEAKGYKEVKKDLIIKLPKYSLFELENGRKRMLASAGELQKGNELALPSKYVNFLYLASHYEKLKGSPEDNEQKQLFVEQHKHYLDEIIEQISEFSKRVILADANLDKVLSAYNKHRDKPIREQAENIIHLFTLTNLGAPAAFKYFDTTIDRKRYTSTKEVLDATLIHQSITGLYETRIDLSQLGGDGGPAPEAAAKGGGGGIPWLMKKPLQLTTLVPLQEYEERLLKQTMLTGSYKEKLQSLFLKYDALWQHWENQVGHRRIKPHHIATGTVNPRPQKQYPINPKAKASIQTVINDLLKQGVLIQQNSIMNTPVYPVPKPDGKWRMVLDYREVNKTIPLIAAQNQHSAGILSSIFRGKYKTTLDLSNGFWAHSITPESYWLTAFTWLGQQYCWTRLPQGFLNSPALFTADVVDLLKEVPNVQVYVDDIYISHDDPREHLEQLEKVFSLLLNAGYVVSLKKSEIAQHEVEFLGFNITKEGRGLTETFKQKLLNITPPRDLKQLQSILGLLNFARNFIPNFSELVKPLYNIIATANGKYITWTTDNSQQLQNIISMLNSAENLEERNPEVRLIMKVNTSPSAGYIRFYNEFAKRPIMYLNYVYTKAEVKFTNTEKLLTTIHKGLIKALDLGMGQEILVYSPIVSMTKIQKTPLPERKALPIRWITWMSYLEDPRIQFHYDKTLPELQQVPTVTDDIIAKIKHPSEFSMVFYTDGSAIKHPNVNKSHNAGMGIAQVQFKPEFTVINTWSIPLGDHTAQLAEVAAVEFACKKALKIDGPVLIVTDSFYVAESVNKELPYWQSNGFFNNKKKPLKHVSKWKSIADCIQLKPDIIIIHEKGHQPTASTFHTEGNNLADKLATQGSYVVNAGKRTADGSEFEKRTADGSEFESPKKKAKVE

SEQ ID NO: 7566 - protein, 2096 aa, synthetic construct
MPAAKRVKLDGGDKKYSIGLDIGTNSVGWAVITDEYKVPSKKFKVLGNTDRHSIKKNLIGALLFDSGETAEATRLKRTARRRYTRRKNRICYLQEIFSNEMAKVDDSFFHRLEESFLVEEDKKHERHPIFGNIVDEVAYHEKYPTIYHLRKKLVDSTDKADLRLIYLALAHMIKFRGHFLIEGDLNPDNSDVDKLFIQLVQTYNQLFEENPINASGVDAKAILSARLSKSRRLENLIAQLPGEKKNGLFGNLIALSLGLTPNFKSNFDLAEDAKLQLSKDTYDDDLDNLLAQIGDQYADLFLAAKNLSDAILLSDILRVNTEITKAPLSASMIKRYDEHHQDLTLLKALVRQQLPEKYKEIFFDQSKNGYAGYIDGGASQEEFYKFIKPILEKMDGTEELLVKLNREDLLRKQRTFDNGSIPHQIHLGELHAILRRQEDFYPFLKDNREKIEKILTFRIPYYVGPLARGNSRFAWMTRKSEETITPWNFEEVVDKGASAQSFIERMTNFDKNLPNEKVLPKHSLLYEYFTVYNELTKVKYVTEGMRKPAFLSGEQKKAIVDLLFKTNRKVTVKQLKEDYFKKIECFDSVEISGVEDRFNASLGTYHDLLKIIKDKDFLDNEENEDILEDIVLTLTLFEDREMIEERLKTYAHLFDDKVMKQLKRRRYTGWGRLSRKLINGIRDKQSGKTILDFLKSDGFANRNFMQLIHDDSLTFKEDIQKAQVSGQGDSLHEHIANLAGSPAIKKGILQTVKVVDELVKVMGRHKPENIVIEMARENQTTQKGQKNSRERMKRIEEGIKELGSQILKEHPVENTQLQNEKLYLYYLQNGRDMYVDQELDINRLSDYDVDHIVPQSFLKDDSIDNKVLTRSDKARGKSDNVPSEEVVKKMKNYWRQLLNAKLITQRKFDNLTKAERGGLSELDKAGFIKRQLVETRQITKHVAQILDSRMNTKYDENDKLIREVKVITLKSKLVSDFRKDFQFYKVREINNYHHAHDAYLNAVVGTALIKKYPKLESEFVYGDYKVYDVRKMIAKSEQEIGKATAKYFFYSNIMNFFKTEITLANGEIRKRPLIETNGETGEIVWDKGRDFATVRKVLSMPQVNIVKKTEVQTGGFSKESILPKRNSDKLIARKKDWDPKKYGGFDSPTVAYSVLVVAKVEKGKSKKLKSVKELLGITIMERSSFEKNPIDFLEAKGYKEVKKDLIIKLPKYSLFELENGRKRMLASAGELQKGNELALPSKYVNFLYLASHYEKLKGSPEDNEQKQLFVEQHKHYLDEIIEQISEFSKRVILADANLDKVLSAYNKHRDKPIREQAENIIHLFTLTNLGAPAAFKYFDTTIDRKRYTSTKEVLDATLIHQSITGLYETRIDLSQLGGDGGPAPEAAAKGGGGGTLNIEDEYRLHETSKEPDVPLGSTWLSDFPQAWAETGGMGLAVRQAPLIIPLKATSTPVSIKQYPMSQEARLGIKPHIQRLLDQGILVPCQSPWNTPLLPVKKPGTNDYRPVQDLREVNKRVEDIHPTVPNPYNLLSGLPPSHQWYTVLDLKDAFFCLRLHPTSQPLFAFEWRDPEMGISGQLTWTRLPQGFKNSPTLFDEALHRDLADFRIQHPDLILLQYVDDLLLAATSEQDCQRGTRALLQTLGNLGYRASAKKAQICQKQVKYLGYLLKEGQRWLTEARKETVMGQPTPKTPRQLREFLGTAGFCRLWIPGFAEMAAPLYPLTKTGTLFNWGPDQQKAYQEIKQALLTAPALGLPDLTKPFELFVDEKQGYAKGVLTQKLGPWRRPVAYLSKKLDPVAAGWPPCLRMVAAIAVLTKDAGKLTMGQPLVILAPHAVEALVKQPPDRWLSNARMTHYQAMLLDTDRVQFGPVVALNPATLLPLPEKEAPHDCLEILAETHGTRPDLTDQPIPDADYTWYTDGSSFLQEGQRRAGAAVTTETEVIWARALPAGTSAQRAELIALTQALKMAEGKKLNVYTDSRYAFATAHVHGEIYRRRGLLTSEGREIKNKNEILALLKALFLPKRLSIIHCPGHQKGNSAEARGNRMADQAAREAAMKAVLETSTLLAGKRTADGSEFEKRTADGSEFESPKKKAKVE

SEQ ID NO: 7567 - protein, 2096 aa, synthetic construct
MPAAKRVKLDGGDKKYSIGLDIGTNSVGWAVITDEYKVPSKKFKVLGNTDRHSIKKNLIGALLFDSGETAEATRLKRTARRRYTRRKNRICYLQEIFSNEMAKVDDSFFHRLEESFLVEEDKKHERHPIFGNIVDEVAYHEKYPTIYHLRKKLVDSTDKADLRLIYLALAHMIKFRGHFLIEGDLNPDNSDVDKLFIQLVQTYNQLFEENPINASGVDAKAILSARLSKSRRLENLIAQLPGEKKNGLFGNLIALSLGLTPNFKSNFDLAEDAKLQLSKDTYDDDLDNLLAQIGDQYADLFLAAKNLSDAILLSDILRVNTEITKAPLSASMIKRYDEHHQDLTLLKALVRQQLPEKYKEIFFDQSKNGYAGYIDGGASQEEFYKFIKPILEKMDGTEELLVKLNREDLLRKQRTFDNGSIPHQIHLGELHAILRRQEDFYPFLKDNREKIEKILTFRIPYYVGPLARGNSRFAWMTRKSEETITPWNFEEVVDKGASAQSFIERMTNFDKNLPNEKVLPKHSLLYEYFTVYNELTKVKYVTEGMRKPAFLSGEQKKAIVDLLFKTNRKVTVKQLKEDYFKKIECFDSVEISGVEDRFNASLGTYHDLLKIIKDKDFLDNEENEDILEDIVLTLTLFEDREMIEERLKTYAHLFDDKVMKQLKRRRYTGWGRLSRKLINGIRDKQSGKTILDFLKSDGFANRNFMQLIHDDSLTFKEDIQKAQVSGQGDSLHEHIANLAGSPAIKKGILQTVKVVDELVKVMGRHKPENIVIEMARENQTTQKGQKNSRERMKRIEEGIKELGSQILKEHPVENTQLQNEKLYLYYLQNGRDMYVDQELDINRLSDYDVDHIVPQSFLKDDSIDNKVLTRSDKARGKSDNVPSEEVVKKMKNYWRQLLNAKLITQRKFDNLTKAERGGLSELDKAGFIKRQLVETRQITKHVAQILDSRMNTKYDENDKLIREVKVITLKSKLVSDFRKDFQFYKVREINNYHHAHDAYLNAVVGTALIKKYPKLESEFVYGDYKVYDVRKMIAKSEQEIGKATAKYFFYSNIMNFFKTEITLANGEIRKRPLIETNGETGEIVWDKGRDFATVRKVLSMPQVNIVKKTEVQTGGFSKESILPKRNSDKLIARKKDWDPKKYGGFDSPTVAYSVLVVAKVEKGKSKKLKSVKELLGITIMERSSFEKNPIDFLEAKGYKEVKKDLIIKLPKYSLFELENGRKRMLASAGELQKGNELALPSKYVNFLYLASHYEKLKGSPEDNEQKQLFVEQHKHYLDEIIEQISEFSKRVILADANLDKVLSAYNKHRDKPIREQAENIIHLFTLTNLGAPAAFKYFDTTIDRKRYTSTKEVLDATLIHQSITGLYETRIDLSQLGGDGGPAPEAAAKGGGGGTLNIEDEYRLHETSKEPDVPLGSTWLSDFPQAWAETGGMGLAVRQAPLIIPLKATSTPVSIKQYPMSQEARLGIKPHIQRLLDQGILVPCQSPWNTPLLPVKKPGTNDYRPVQDLREVNKRVEDIHPTVPNPYNLLSGLPPSHQWYTVLDLKDAFFCLRLHPTSQPLFAFEWRDPEMGISGQLTWTRLPQGFKNSPTLFNEALHRDLADFRIQHPDLILLQYVDDLLLAATSEQDCQRGTRALLQTLGNLGYRASAKKAQICQKQVKYLGYLLKEGQRWLTEARKETVMGQPTPKTPRQLREFLGTAGFCRLWIPGFAEMAAPLYPLTKPGTLFNWGPDQQKAYQEIKQALLTAPALGLPDLTKPFELFVDEKQGYAKGVLTQKLGPWRRPVAYLSKKLDPVAAGWPPCLRMVAAIAVLTKDAGKLTMGQPLVILAPHAVEALVKQPPDRWLSNARMTHYQAMLLDTDRVQFGPVVALNPATLLPLPEKEAPHDCLEILAETHGTRPDLTDQPIPDADYTWYTDGSSFLQEGQRRAGAAVTTETEVIWARALPAGTSAQRAELIALTQALKMAEGKKLNVYTDSRYAFATAHVHGEIYRRRGWLTSEGREIKNKNEILALLKALFLPKRLSIIHCPGHQKGNSAEARGNRMADQAAREAAMKAVLETSTLLAGKRTADGSEFEKRTADGSEFESPKKKAKVE

SEQ ID NO: 7568 - protein, 2096 aa, synthetic construct
MPAAKRVKLDGGDKKYSIGLDIGTNSVGWAVITDEYKVPSKKFKVLGNTDRHSIKKNLIGALLFDSGETAEATRLKRTARRRYTRRKNRICYLQEIFSNEMAKVDDSFFHRLEESFLVEEDKKHERHPIFGNIVDEVAYHEKYPTIYHLRKKLVDSTDKADLRLIYLALAHMIKFRGHFLIEGDLNPDNSDVDKLFIQLVQTYNQLFEENPINASGVDAKAILSARLSKSRRLENLIAQLPGEKKNGLFGNLIALSLGLTPNFKSNFDLAEDAKLQLSKDTYDDDLDNLLAQIGDQYADLFLAAKNLSDAILLSDILRVNTEITKAPLSASMIKRYDEHHQDLTLLKALVRQQLPEKYKEIFFDQSKNGYAGYIDGGASQEEFYKFIKPILEKMDGTEELLVKLNREDLLRKQRTFDNGSIPHQIHLGELHAILRRQEDFYPFLKDNREKIEKILTFRIPYYVGPLARGNSRFAWMTRKSEETITPWNFEEVVDKGASAQSFIERMTNFDKNLPNEKVLPKHSLLYEYFTVYNELTKVKYVTEGMRKPAFLSGEQKKAIVDLLFKTNRKVTVKQLKEDYFKKIECFDSVEISGVEDRFNASLGTYHDLLKIIKDKDFLDNEENEDILEDIVLTLTLFEDREMIEERLKTYAHLFDDKVMKQLKRRRYTGWGRLSRKLINGIRDKQSGKTILDFLKSDGFANRNFMQLIHDDSLTFKEDIQKAQVSGQGDSLHEHIANLAGSPAIKKGILQTVKVVDELVKVMGRHKPENIVIEMARENQTTQKGQKNSRERMKRIEEGIKELGSQILKEHPVENTQLQNEKLYLYYLQNGRDMYVDQELDINRLSDYDVDHIVPQSFLKDDSIDNKVLTRSDKARGKSDNVPSEEVVKKMKNYWRQLLNAKLITQRKFDNLTKAERGGLSELDKAGFIKRQLVETRQITKHVAQILDSRMNTKYDENDKLIREVKVITLKSKLVSDFRKDFQFYKVREINNYHHAHDAYLNAVVGTALIKKYPKLESEFVYGDYKVYDVRKMIAKSEQEIGKATAKYFFYSNIMNFFKTEITLANGEIRKRPLIETNGETGEIVWDKGRDFATVRKVLSMPQVNIVKKTEVQTGGFSKESILPKRNSDKLIARKKDWDPKKYGGFDSPTVAYSVLVVAKVEKGKSKKLKSVKELLGITIMERSSFEKNPIDFLEAKGYKEVKKDLIIKLPKYSLFELENGRKRMLASAGELQKGNELALPSKYVNFLYLASHYEKLKGSPEDNEQKQLFVEQHKHYLDEIIEQISEFSKRVILADANLDKVLSAYNKHRDKPIREQAENIIHLFTLTNLGAPAAFKYFDTTIDRKRYTSTKEVLDATLIHQSITGLYETRIDLSQLGGDGGPAPEAAAKGGGGGTLNIEDEYRLHETSKEPDVPLGSTWLSDFPQAWAETGGMGLAVRQAPLIIPLKATSTPVSIKQYPMSQEARLGIKPHIQRLLDQGILVPCQSPWNTPLLPVKKPGTNDYRPVQDLREVNKRVEDIHPTVPNPYNLLSGLPPSHQWYTVLDLKDAFFCLRLHPTSQPLFAFEWRDPEMGISGQLTWTRLPQGFKNSPTLFNEALHRDLADFRIQHPDLILLQYVDDLLLAATSEQDCQRGTRALLQTLGNLGYRASAKKAQICQKQVKYLGYLLKEGQRWLTEARKETVMGQPTPKTPRQLREFLGKAGFCRLFIPGFAEMAAPLYPLTKPGTLFNWGPDQQKAYQEIKQALLTAPALGLPDLTKPFELFVDEKQGYAKGVLTQKLGPWRRPVAYLSKKLDPVAAGWPPCLRMVAAIAVLTKDAGKLTMGQPLVILAPHAVEALVKQPPDRWLSNARMTHYQAMLLDTDRVQFGPVVALNPATLLPLPEKEAPHDCLEILAETHGTRPDLTDQPIPDADYTWYTDGSSFLQEGQRRAGAAVTTETEVIWARALPAGTSAQRAELIALTQALKMAEGKKLNVYTDSRYAFATAHVHGEIYRRRGWLTSEGREIKNKNEILALLKALFLPKRLSIIHCPGHQKGNSAEARGNRMADQAAREAAMKAVLETSTLLAGKRTADGSEFEKRTADGSEFESPKKKAKVE

SEQ ID NO: 7569 - protein, 2098 aa, synthetic construct
MPAAKRVKLDGGDKKYSIGLDIGTNSVGWAVITDEYKVPSKKFKVLGNTDRHSIKKNLIGALLFDSGETAEATRLKRTARRRYTRRKNRICYLQEIFSNEMAKVDDSFFHRLEESFLVEEDKKHERHPIFGNIVDEVAYHEKYPTIYHLRKKLVDSTDKADLRLIYLALAHMIKFRGHFLIEGDLNPDNSDVDKLFIQLVQTYNQLFEENPINASGVDAKAILSARLSKSRRLENLIAQLPGEKKNGLFGNLIALSLGLTPNFKSNFDLAEDAKLQLSKDTYDDDLDNLLAQIGDQYADLFLAAKNLSDAILLSDILRVNTEITKAPLSASMIKRYDEHHQDLTLLKALVRQQLPEKYKEIFFDQSKNGYAGYIDGGASQEEFYKFIKPILEKMDGTEELLVKLNREDLLRKQRTFDNGSIPHQIHLGELHAILRRQEDFYPFLKDNREKIEKILTFRIPYYVGPLARGNSRFAWMTRKSEETITPWNFEEVVDKGASAQSFIERMTNFDKNLPNEKVLPKHSLLYEYFTVYNELTKVKYVTEGMRKPAFLSGEQKKAIVDLLFKTNRKVTVKQLKEDYFKKIECFDSVEISGVEDRFNASLGTYHDLLKIIKDKDFLDNEENEDILEDIVLTLTLFEDREMIEERLKTYAHLFDDKVMKQLKRRRYTGWGRLSRKLINGIRDKQSGKTILDFLKSDGFANRNFMQLIHDDSLTFKEDIQKAQVSGQGDSLHEHIANLAGSPAIKKGILQTVKVVDELVKVMGRHKPENIVIEMARENQTTQKGQKNSRERMKRIEEGIKELGSQILKEHPVENTQLQNEKLYLYYLQNGRDMYVDQELDINRLSDYDVDHIVPQSFLKDDSIDNKVLTRSDKARGKSDNVPSEEVVKKMKNYWRQLLNAKLITQRKFDNLTKAERGGLSELDKAGFIKRQLVETRQITKHVAQILDSRMNTKYDENDKLIREVKVITLKSKLVSDFRKDFQFYKVREINNYHHAHDAYLNAVVGTALIKKYPKLESEFVYGDYKVYDVRKMIAKSEQEIGKATAKYFFYSNIMNFFKTEITLANGEIRKRPLIETNGETGEIVWDKGRDFATVRKVLSMPQVNIVKKTEVQTGGFSKESILPKRNSDKLIARKKDWDPKKYGGFDSPTVAYSVLVVAKVEKGKSKKLKSVKELLGITIMERSSFEKNPIDFLEAKGYKEVKKDLIIKLPKYSLFELENGRKRMLASAGELQKGNELALPSKYVNFLYLASHYEKLKGSPEDNEQKQLFVEQHKHYLDEIIEQISEFSKRVILADANLDKVLSAYNKHRDKPIREQAENIIHLFTLTNLGAPAAFKYFDTTIDRKRYTSTKEVLDATLIHQSITGLYETRIDLSQLGGDGGGSSEAAAKPAPGGTAPLEEEYRLFLEAPIQNVTLLEQWKREIPKVWAEINPPGLASTQAPIHVQLLSTALPVRVRQYPITLEAKRSLRETIRKFRAAGILRPVHSPWNTPLLPVRKSGTSEYRMVQDLREVNKRVETIHPTVPNPYTLLSLLPPDRIWYSVLDLKDAFFCIPLAPESQLIFAFEWADAEEGESGQLTWTRLPQGFKNSPTLFNEALNRDLQGFRLDHPSVSLLQYVDDLLIAADTQAACLSATRDLLMTLAELGYRVSGKKAQLCQEEVTYLGFKIHKGSRSLSNSRTQAILQIPVPKTKRQVREFLGTIGYCRLWIPGFAELAQPLYAATRPGNDPLVWGEKEEEAFQSLKLALTQPPALALPSLDKPFQLFVEETSGAAKGVLTQALGPWKRPVAYLSKRLDPVAAGWPRCLRAIAAAALLTREASKLTFGQDIEITSSHNLESLLRSPPDKWLTNARITQYQVLLLDPPRVRFKQTAALNPATLLPETDDTLPIHHCLDTLDSLTSTRPDLTDQPLAQAEATLFTDGSSYIRDGKRYAGAAVVTLDSVIWAEPLPIGTSAQKAELIALTKALEWSKDKSVNIYTDSRYAFATLHVHGMIYRERGWLTAGGKAIKNAPEILALLTAVWLPKRVAVMHCKGHQKDDAPTSTGNRRADEVAREVAIRPLSTQATISAGKRTADGSEFEKRTADGSEFESPKKKAKVE

SEQ ID NO: 7570 - protein, 2102 aa, synthetic construct
MPAAKRVKLDGGDKKYSIGLDIGTNSVGWAVITDEYKVPSKKFKVLGNTDRHSIKKNLIGALLFDSGETAEATRLKRTARRRYTRRKNRICYLQEIFSNEMAKVDDSFFHRLEESFLVEEDKKHERHPIFGNIVDEVAYHEKYPTIYHLRKKLVDSTDKADLRLIYLALAHMIKFRGHFLIEGDLNPDNSDVDKLFIQLVQTYNQLFEENPINASGVDAKAILSARLSKSRRLENLIAQLPGEKKNGLFGNLIALSLGLTPNFKSNFDLAEDAKLQLSKDTYDDDLDNLLAQIGDQYADLFLAAKNLSDAILLSDILRVNTEITKAPLSASMIKRYDEHHQDLTLLKALVRQQLPEKYKEIFFDQSKNGYAGYIDGGASQEEFYKFIKPILEKMDGTEELLVKLNREDLLRKQRTFDNGSIPHQIHLGELHAILRRQEDFYPFLKDNREKIEKILTFRIPYYVGPLARGNSRFAWMTRKSEETITPWNFEEVVDKGASAQSFIERMTNFDKNLPNEKVLPKHSLLYEYFTVYNELTKVKYVTEGMRKPAFLSGEQKKAIVDLLFKTNRKVTVKQLKEDYFKKIECFDSVEISGVEDRFNASLGTYHDLLKIIKDKDFLDNEENEDILEDIVLTLTLFEDREMIEERLKTYAHLFDDKVMKQLKRRRYTGWGRLSRKLINGIRDKQSGKTILDFLKSDGFANRNFMQLIHDDSLTFKEDIQKAQVSGQGDSLHEHIANLAGSPAIKKGILQTVKVVDELVKVMGRHKPENIVIEMARENQTTQKGQKNSRERMKRIEEGIKELGSQILKEHPVENTQLQNEKLYLYYLQNGRDMYVDQELDINRLSDYDVDHIVPQSFLKDDSIDNKVLTRSDKARGKSDNVPSEEVVKKMKNYWRQLLNAKLITQRKFDNLTKAERGGLSELDKAGFIKRQLVETRQITKHVAQILDSRMNTKYDENDKLIREVKVITLKSKLVSDFRKDFQFYKVREINNYHHAHDAYLNAVVGTALIKKYPKLESEFVYGDYKVYDVRKMIAKSEQEIGKATAKYFFYSNIMNFFKTEITLANGEIRKRPLIETNGETGEIVWDKGRDFATVRKVLSMPQVNIVKKTEVQTGGFSKESILPKRNSDKLIARKKDWDPKKYGGFDSPTVAYSVLVVAKVEKGKSKKLKSVKELLGITIMERSSFEKNPIDFLEAKGYKEVKKDLIIKLPKYSLFELENGRKRMLASAGELQKGNELALPSKYVNFLYLASHYEKLKGSPEDNEQKQLFVEQHKHYLDEIIEQISEFSKRVILADANLDKVLSAYNKHRDKPIREQAENIIHLFTLTNLGAPAAFKYFDTTIDRKRYTSTKEVLDATLIHQSITGLYETRIDLSQLGGDGGGSSEAAAKPAPGGTVSLQDEHRLFDIPVTTSLPDVWLQDFPQAWAETGGLGRAKCQAPIIIDLKPTAVPVSIKQYPMSLEAHMGIRQHIIKFLELGVLRPCRSPWNTPLLPVKKPGTQDYRPVQDLREINKRTVDIHPTVPNPYNLLSTLKPDYSWYTVLDLKDAFFCLPLAPQSQELFAFEWKDPERGISGQLTWTRLPQGFKNSPTLFNEALHRDLTDFRTQHPEVTLLQYVDDLLLAAPTKKACTQGTRHLLQELGEKGYRASAKKAQICQTKVTYLGYILSEGKRWLTPGRIETVARIPPPRNPREVREFLGTAGFCRLWIPGFAELAAPLYALTKPSTPFTWQTEHQLAFEALKKALLSAPALGLPDTSKPFTLFLDERQGIAKGVLTQKLGPWKRPVAYLSKKLDPVAAGWPPCLRIMAATAMLVKDSAKLTLGQPLTVITPHTLEAIVRQPPDRWITNARLTHYQALLLDTDRVQFGPPVTLNPATLLPVPENQPSPHDCRQVLAETHGTREDLKDQELPDADHTWYTDGSSYLDSGTRRAGAAVVDGHNTIWAQSLPPGTSAQKAELIALTKALELSKGKKANIYTDSRYAFATAHTHGSIYERRGWLTSEGKEIKNKAEIIALLKALFLPQEVAIIHCPGHQKGQDPVAVGNRQADRVARQAAMAEVLTLATEPDNTSHITAGKRTADGSEFEKRTADGSEFESPKKKAKVE

SEQ ID NO: 7571 - protein, 2173 aa, synthetic construct
MPAAKRVKLDGGDKKYSIGLDIGTNSVGWAVITDEYKVPSKKFKVLGNTDRHSIKKNLIGALLFDSGETAEATRLKRTARRRYTRRKNRICYLQEIFSNEMAKVDDSFFHRLEESFLVEEDKKHERHPIFGNIVDEVAYHEKYPTIYHLRKKLVDSTDKADLRLIYLALAHMIKFRGHFLIEGDLNPDNSDVDKLFIQLVQTYNQLFEENPINASGVDAKAILSARLSKSRRLENLIAQLPGEKKNGLFGNLIALSLGLTPNFKSNFDLAEDAKLQLSKDTYDDDLDNLLAQIGDQYADLFLAAKNLSDAILLSDILRVNTEITKAPLSASMIKRYDEHHQDLTLLKALVRQQLPEKYKEIFFDQSKNGYAGYIDGGASQEEFYKFIKPILEKMDGTEELLVKLNREDLLRKQRTFDNGSIPHQIHLGELHAILRRQEDFYPFLKDNREKIEKILTFRIPYYVGPLARGNSRFAWMTRKSEETITPWNFEEVVDKGASAQSFIERMTNFDKNLPNEKVLPKHSLLYEYFTVYNELTKVKYVTEGMRKPAFLSGEQKKAIVDLLFKTNRKVTVKQLKEDYFKKIECFDSVEISGVEDRFNASLGTYHDLLKIIKDKDFLDNEENEDILEDIVLTLTLFEDREMIEERLKTYAHLFDDKVMKQLKRRRYTGWGRLSRKLINGIRDKQSGKTILDFLKSDGFANRNFMQLIHDDSLTFKEDIQKAQVSGQGDSLHEHIANLAGSPAIKKGILQTVKVVDELVKVMGRHKPENIVIEMARENQTTQKGQKNSRERMKRIEEGIKELGSQILKEHPVENTQLQNEKLYLYYLQNGRDMYVDQELDINRLSDYDVDHIVPQSFLKDDSIDNKVLTRSDKARGKSDNVPSEEVVKKMKNYWRQLLNAKLITQRKFDNLTKAERGGLSELDKAGFIKRQLVETRQITKHVAQILDSRMNTKYDENDKLIREVKVITLKSKLVSDFRKDFQFYKVREINNYHHAHDAYLNAVVGTALIKKYPKLESEFVYGDYKVYDVRKMIAKSEQEIGKATAKYFFYSNIMNFFKTEITLANGEIRKRPLIETNGETGEIVWDKGRDFATVRKVLSMPQVNIVKKTEVQTGGFSKESILPKRNSDKLIARKKDWDPKKYGGFDSPTVAYSVLVVAKVEKGKSKKLKSVKELLGITIMERSSFEKNPIDFLEAKGYKEVKKDLIIKLPKYSLFELENGRKRMLASAGELQKGNELALPSKYVNFLYLASHYEKLKGSPEDNEQKQLFVEQHKHYLDEIIEQISEFSKRVILADANLDKVLSAYNKHRDKPIREQAENIIHLFTLTNLGAPAAFKYFDTTIDRKRYTSTKEVLDATLIHQSITGLYETRIDLSQLGGDGGGSSEAAAKPAPGGMDLLKPLTVERKGVKIKGYWNSQADITCVPKDLLQGEEPVRQQNVTTIHGTQEGDVYYVNLKIDGRRINTEVIGTTLDYAIITPGDVPWILKKPLELTIKLDLEEQQGTLLNNSILSKKGKEELKQLFEKYSALWQSWENQVGHRRIRPHKIATGTVKPTPQKQYHINPKAKPDIQIVINDLLKQGVLIQKESTMNTPVYPVPKPNGRWRMVLDYRAVNKVTPLIAVQNQHSYGILGSLFKGRYKTTIDLSNGFWAHPIVPEDYWITAFTWQGKQYCWTVLPQGFLNSPGLFNGDVVDLLQGIPNVEVYVDDVYISHDSEKEHLEYLDILFNRLKEAGYIISLKKSNIANSIVDFLGFQITNEGRGLTDTFKEKLENITAPTTLKQLQSILGLLNFARNFIPDFTELIAPLYALIPKSPKNYVPWQIEHSTTLETLITKLNGAEYLQGRKGDKTLIMKVNASYTTGYIRYYNEGEKKPISYVSIVFSKTELKFTELEKLLTTVHKGLLKALDLSMGQNIHVYSPIVSMQNIQKTPQTAKKALASRWLSWLSYLEDPRIRFFYDPQMPALKDLPAVDTGKDNKKHPSNFQHIFYTDGSAITSPTKEGHLNAGMGIVYFINKDGNLQKQQEWSISLGNHTAQFAEIAAFEFALKKCLPLGGNILVVTDSNYVAKAYNEELDVWASNGFVNNRKKPLKHISKWKSVADLKRLRPDVVVTHEPGHQKLDSSPHAYGNNLADQLATQASFKVHAGKRTADGSEFEKRTADGSEFESPKKKAKVE

SEQ ID NO: 7572 - protein, 2095 aa, synthetic construct
MPAAKRVKLDGGDKKYSIGLDIGTNSVGWAVITDEYKVPSKKFKVLGNTDRHSIKKNLIGALLFDSGETAEATRLKRTARRRYTRRKNRICYLQEIFSNEMAKVDDSFFHRLEESFLVEEDKKHERHPIFGNIVDEVAYHEKYPTIYHLRKKLVDSTDKADLRLIYLALAHMIKFRGHFLIEGDLNPDNSDVDKLFIQLVQTYNQLFEENPINASGVDAKAILSARLSKSRRLENLIAQLPGEKKNGLFGNLIALSLGLTPNFKSNFDLAEDAKLQLSKDTYDDDLDNLLAQIGDQYADLFLAAKNLSDAILLSDILRVNTEITKAPLSASMIKRYDEHHQDLTLLKALVRQQLPEKYKEIFFDQSKNGYAGYIDGGASQEEFYKFIKPILEKMDGTEELLVKLNREDLLRKQRTFDNGSIPHQIHLGELHAILRRQEDFYPFLKDNREKIEKILTFRIPYYVGPLARGNSRFAWMTRKSEETITPWNFEEVVDKGASAQSFIERMTNFDKNLPNEKVLPKHSLLYEYFTVYNELTKVKYVTEGMRKPAFLSGEQKKAIVDLLFKTNRKVTVKQLKEDYFKKIECFDSVEISGVEDRFNASLGTYHDLLKIIKDKDFLDNEENEDILEDIVLTLTLFEDREMIEERLKTYAHLFDDKVMKQLKRRRYTGWGRLSRKLINGIRDKQSGKTILDFLKSDGFANRNFMQLIHDDSLTFKEDIQKAQVSGQGDSLHEHIANLAGSPAIKKGILQTVKVVDELVKVMGRHKPENIVIEMARENQTTQKGQKNSRERMKRIEEGIKELGSQILKEHPVENTQLQNEKLYLYYLQNGRDMYVDQELDINRLSDYDVDHIVPQSFLKDDSIDNKVLTRSDKARGKSDNVPSEEVVKKMKNYWRQLLNAKLITQRKFDNLTKAERGGLSELDKAGFIKRQLVETRQITKHVAQILDSRMNTKYDENDKLIREVKVITLKSKLVSDFRKDFQFYKVREINNYHHAHDAYLNAVVGTALIKKYPKLESEFVYGDYKVYDVRKMIAKSEQEIGKATAKYFFYSNIMNFFKTEITLANGEIRKRPLIETNGETGEIVWDKGRDFATVRKVLSMPQVNIVKKTEVQTGGFSKESILPKRNSDKLIARKKDWDPKKYGGFDSPTVAYSVLVVAKVEKGKSKKLKSVKELLGITIMERSSFEKNPIDFLEAKGYKEVKKDLIIKLPKYSLFELENGRKRMLASAGELQKGNELALPSKYVNFLYLASHYEKLKGSPEDNEQKQLFVEQHKHYLDEIIEQISEFSKRVILADANLDKVLSAYNKHRDKPIREQAENIIHLFTLTNLGAPAAFKYFDTTIDRKRYTSTKEVLDATLIHQSITGLYETRIDLSQLGGDGGGSSEAAAKPAPGGTLQLEEEYRLFEPESTQKQEMDIWLKNFPQAWAETGGMGTAHCQAPVLIQLKATATPISIRQYPMPHEAYQGIKPHIRRMLDQGILKPCQSPWNTPLLPVKKPGTEDYRPVQDLREVNKRVEDIHPTVPNPYNLLSTLPPSHPWYTVLDLKDAFFCLRLHSESQLLFAFEWRDPEIGLSGQLTWTRLPQGFKNSPTLFNEALHSDLADFRVRYPALVLLQYVDDLLLAAATRTECLEGTKALLETLGNKGYRASAKKAQICLQEVTYLGYSLKDGQRWLTKARKEAILSIPVPKNSRQVREFLGTAGYCRLWIPGFAELAAPLYPLTRPGTLFQWGTEQQLAFEDIKKALLSSPALGLPDITKPFELFIDENSGFAKGVLVQKLGPWKRPVAYLSKKLDTVASGWPPCLRMVAAIAILVKDAGKLTLGQPLTILTSHPVEALVRQPPNKWLSNARMTHYQAMLLDAERVHFGPTVSLNPATLLPLPSGGNHHDCLQILAETHGTRPDLTDQPLPDADLTWYTDGSSFIRNGEREAGAAVTTESEVIWAAPLPPGTSAQRAELIALTQALKMAEGKKLTVYTDSRYAFATTHVHGEIYRRRGWLTSEGKEIKNKNEILALLEALFLPKRLSIIHCPGHQKGDSPQAKGNRLADDTAKKAATETHSSLTVLPAGKRTADGSEFEKRTADGSEFESPKKKAKVE

SEQ ID NO: 7573 - protein, 2087 aa, synthetic construct
MPAAKRVKLDGGDKKYSIGLDIGTNSVGWAVITDEYKVPSKKFKVLGNTDRHSIKKNLIGALLFDSGETAEATRLKRTARRRYTRRKNRICYLQEIFSNEMAKVDDSFFHRLEESFLVEEDKKHERHPIFGNIVDEVAYHEKYPTIYHLRKKLVDSTDKADLRLIYLALAHMIKFRGHFLIEGDLNPDNSDVDKLFIQLVQTYNQLFEENPINASGVDAKAILSARLSKSRRLENLIAQLPGEKKNGLFGNLIALSLGLTPNFKSNFDLAEDAKLQLSKDTYDDDLDNLLAQIGDQYADLFLAAKNLSDAILLSDILRVNTEITKAPLSASMIKRYDEHHQDLTLLKALVRQQLPEKYKEIFFDQSKNGYAGYIDGGASQEEFYKFIKPILEKMDGTEELLVKLNREDLLRKQRTFDNGSIPHQIHLGELHAILRRQEDFYPFLKDNREKIEKILTFRIPYYVGPLARGNSRFAWMTRKSEETITPWNFEEVVDKGASAQSFIERMTNFDKNLPNEKVLPKHSLLYEYFTVYNELTKVKYVTEGMRKPAFLSGEQKKAIVDLLFKTNRKVTVKQLKEDYFKKIECFDSVEISGVEDRFNASLGTYHDLLKIIKDKDFLDNEENEDILEDIVLTLTLFEDREMIEERLKTYAHLFDDKVMKQLKRRRYTGWGRLSRKLINGIRDKQSGKTILDFLKSDGFANRNFMQLIHDDSLTFKEDIQKAQVSGQGDSLHEHIANLAGSPAIKKGILQTVKVVDELVKVMGRHKPENIVIEMARENQTTQKGQKNSRERMKRIEEGIKELGSQILKEHPVENTQLQNEKLYLYYLQNGRDMYVDQELDINRLSDYDVDHIVPQSFLKDDSIDNKVLTRSDKARGKSDNVPSEEVVKKMKNYWRQLLNAKLITQRKFDNLTKAERGGLSELDKAGFIKRQLVETRQITKHVAQILDSRMNTKYDENDKLIREVKVITLKSKLVSDFRKDFQFYKVREINNYHHAHDAYLNAVVGTALIKKYPKLESEFVYGDYKVYDVRKMIAKSEQEIGKATAKYFFYSNIMNFFKTEITLANGEIRKRPLIETNGETGEIVWDKGRDFATVRKVLSMPQVNIVKKTEVQTGGFSKESILPKRNSDKLIARKKDWDPKKYGGFDSPTVAYSVLVVAKVEKGKSKKLKSVKELLGITIMERSSFEKNPIDFLEAKGYKEVKKDLIIKLPKYSLFELENGRKRMLASAGELQKGNELALPSKYVNFLYLASHYEKLKGSPEDNEQKQLFVEQHKHYLDEIIEQISEFSKRVILADANLDKVLSAYNKHRDKPIREQAENIIHLFTLTNLGAPAAFKYFDTTIDRKRYTSTKEVLDATLIHQSITGLYETRIDLSQLGGDGGGSSEAAAKPAPGGVPWLTQQPLQLTILVPLQEYQEKILSKTALPEDQKQQLKTLFVKYDNLWQHWENQVGHRKIRPHNIATGDYPPRPQKQYPINPKAKPSIQIVIDDLLKQGVLTPQNSTMNTPVYPVPKPDGRWRMVLDYREVNKTIPLTAAQNQHSAGILATIVRQKYKTTLDLANGFWAHPITPESYWLTAFTWQGKQYCWTRLPQGFLNSPALFNADVVDLLKEIPNVQVYVDDIYLSHDDPKEHVQQLEKVFQILLQAGYVVSLKKSEIGQKTVEFLGFNITKEGRGLTDTFKTKLLNITPPKDLKQLQSILGKLNFARNFIPNFAELVQPLYNLIAPAKGKYIEWSEENTKQLNMVIEALNTASNLEERLPEQRLVIKVNTSPSAGYVRYYNETGKKPIMYLNYVFSKAELKFSMLEKLLTTMHKALIKAMDLAMGQEILVYSPIVSMTKIQKTPLPERKALPIRWITWMTYLEDPRIQFHYDKTLPELKHIPDVYTSSQSPVKHPSQYEGVFYTDGSAIKSPDPTKSNNAGMGIVHATYKPEYQVLNQWSIPLGNHTAQMAEIAAVEFACKKALKIPGPVLVITDSFYVAESANKELPYWKSNGFVNNKKKPLKHISKWKSIAECLSMKPDITIQHEKGISLQIPVFILKGNALADKLATQGSYVVNAGKRTADGSEFEKRTADGSEFESPKKKAKVE

SEQ ID NO: 7574 - protein, 2127 aa, synthetic construct
MPAAKRVKLDGGDKKYSIGLDIGTNSVGWAVITDEYKVPSKKFKVLGNTDRHSIKKNLIGALLFDSGETAEATRLKRTARRRYTRRKNRICYLQEIFSNEMAKVDDSFFHRLEESFLVEEDKKHERHPIFGNIVDEVAYHEKYPTIYHLRKKLVDSTDKADLRLIYLALAHMIKFRGHFLIEGDLNPDNSDVDKLFIQLVQTYNQLFEENPINASGVDAKAILSARLSKSRRLENLIAQLPGEKKNGLFGNLIALSLGLTPNFKSNFDLAEDAKLQLSKDTYDDDLDNLLAQIGDQYADLFLAAKNLSDAILLSDILRVNTEITKAPLSASMIKRYDEHHQDLTLLKALVRQQLPEKYKEIFFDQSKNGYAGYIDGGASQEEFYKFIKPILEKMDGTEELLVKLNREDLLRKQRTFDNGSIPHQIHLGELHAILRRQEDFYPFLKDNREKIEKILTFRIPYYVGPLARGNSRFAWMTRKSEETITPWNFEEVVDKGASAQSFIERMTNFDKNLPNEKVLPKHSLLYEYFTVYNELTKVKYVTEGMRKPAFLSGEQKKAIVDLLFKTNRKVTVKQLKEDYFKKIECFDSVEISGVEDRFNASLGTYHDLLKIIKDKDFLDNEENEDILEDIVLTLTLFEDREMIEERLKTYAHLFDDKVMKQLKRRRYTGWGRLSRKLINGIRDKQSGKTILDFLKSDGFANRNFMQLIHDDSLTFKEDIQKAQVSGQGDSLHEHIANLAGSPAIKKGILQTVKVVDELVKVMGRHKPENIVIEMARENQTTQKGQKNSRERMKRIEEGIKELGSQILKEHPVENTQLQNEKLYLYYLQNGRDMYVDQELDINRLSDYDVDHIVPQSFLKDDSIDNKVLTRSDKARGKSDNVPSEEVVKKMKNYWRQLLNAKLITQRKFDNLTKAERGGLSELDKAGFIKRQLVETRQITKHVAQILDSRMNTKYDENDKLIREVKVITLKSKLVSDFRKDFQFYKVREINNYHHAHDAYLNAVVGTALIKKYPKLESEFVYGDYKVYDVRKMIAKSEQEIGKATAKYFFYSNIMNFFKTEITLANGEIRKRPLIETNGETGEIVWDKGRDFATVRKVLSMPQVNIVKKTEVQTGGFSKESILPKRNSDKLIARKKDWDPKKYGGFDSPTVAYSVLVVAKVEKGKSKKLKSVKELLGITIMERSSFEKNPIDFLEAKGYKEVKKDLIIKLPKYSLFELENGRKRMLASAGELQKGNELALPSKYVNFLYLASHYEKLKGSPEDNEQKQLFVEQHKHYLDEIIEQISEFSKRVILADANLDKVLSAYNKHRDKPIREQAENIIHLFTLTNLGAPAAFKYFDTTIDRKRYTSTKEVLDATLIHQSITGLYETRIDLSQLGGDGGGSSEAAAKPAPGGLLGRDLLTKLKAQIQFSTEGPQVTWEDRPAMCLVLNLEEEYRLHEKPVPPSIDPSWLQLFPMVWAEKAGMGLANQVPPVVVELKSDASPVAVRQYPMSKEAREGIRPHIQRFLDLGILVPCQSPWNTPLLPVKKPGTNDYRPVQDLREVNKRVQDIHPTVPNPYNLLSSLPPSHTWYSVLDLKDAFFCLKLHPNSQPLFAFEWRDPEKGNTGQLTWTRLPQGFKNSPTLFNEALHRDLASFRALNPQVVMLQYVDDLLVAAPTYRDCKEGTRRLLQELSKLGYRVSAKKAQLCREEVTYLGYLLKGGKRWLTPARKATVMKIPTPTTPRQVREFLGTAGFCRLWIPGFASLAAPLYPLTRPKVPFTWTEAHQEAFGRIKEALLSAPALALPDLTKPFALYVDEKEGVARGVLTQTLGPWRRPVAYLSKKLDPVASGWPTCLKAIAAVALLLKDADKLTLGQNVLVIAPHNLESIVRQPPDRWMTNARMTHYQSLLLNERVSFAPPAILNPATLLPVESDDTPIHICSEILAEETGTRPDLRDQPLPGVPAWYTDGSSFIMDGRRQAGAAIVDNKRTVWASNLPEGTSAQKAELIALTQALRLAEGKSINIYTDSRYAFATAHVHGAIYKQRGWLTSAGKDIKNKEEILALLEAIHLPKRVAIIHCPGHQRGTDPVATGNRKADEAAKQAAQSTRILTETTKNAGKRTADGSEFEKRTADGSEFESPKKKAKVE

SEQ ID NO: 7575 - protein, 2218 aa, synthetic construct
MPAAKRVKLDGGDKKYSIGLDIGTNSVGWAVITDEYKVPSKKFKVLGNTDRHSIKKNLIGALLFDSGETAEATRLKRTARRRYTRRKNRICYLQEIFSNEMAKVDDSFFHRLEESFLVEEDKKHERHPIFGNIVDEVAYHEKYPTIYHLRKKLVDSTDKADLRLIYLALAHMIKFRGHFLIEGDLNPDNSDVDKLFIQLVQTYNQLFEENPINASGVDAKAILSARLSKSRRLENLIAQLPGEKKNGLFGNLIALSLGLTPNFKSNFDLAEDAKLQLSKDTYDDDLDNLLAQIGDQYADLFLAAKNLSDAILLSDILRVNTEITKAPLSASMIKRYDEHHQDLTLLKALVRQQLPEKYKEIFFDQSKNGYAGYIDGGASQEEFYKFIKPILEKMDGTEELLVKLNREDLLRKQRTFDNGSIPHQIHLGELHAILRRQEDFYPFLKDNREKIEKILTFRIPYYVGPLARGNSRFAWMTRKSEETITPWNFEEVVDKGASAQSFIERMTNFDKNLPNEKVLPKHSLLYEYFTVYNELTKVKYVTEGMRKPAFLSGEQKKAIVDLLFKTNRKVTVKQLKEDYFKKIECFDSVEISGVEDRFNASLGTYHDLLKIIKDKDFLDNEENEDILEDIVLTLTLFEDREMIEERLKTYAHLFDDKVMKQLKRRRYTGWGRLSRKLINGIRDKQSGKTILDFLKSDGFANRNFMQLIHDDSLTFKEDIQKAQVSGQGDSLHEHIANLAGSPAIKKGILQTVKVVDELVKVMGRHKPENIVIEMARENQTTQKGQKNSRERMKRIEEGIKELGSQILKEHPVENTQLQNEKLYLYYLQNGRDMYVDQELDINRLSDYDVDHIVPQSFLKDDSIDNKVLTRSDKARGKSDNVPSEEVVKKMKNYWRQLLNAKLITQRKFDNLTKAERGGLSELDKAGFIKRQLVETRQITKHVAQILDSRMNTKYDENDKLIREVKVITLKSKLVSDFRKDFQFYKVREINNYHHAHDAYLNAVVGTALIKKYPKLESEFVYGDYKVYDVRKMIAKSEQEIGKATAKYFFYSNIMNFFKTEITLANGEIRKRPLIETNGETGEIVWDKGRDFATVRKVLSMPQVNIVKKTEVQTGGFSKESILPKRNSDKLIARKKDWDPKKYGGFDSPTVAYSVLVVAKVEKGKSKKLKSVKELLGITIMERSSFEKNPIDFLEAKGYKEVKKDLIIKLPKYSLFELENGRKRMLASAGELQKGNELALPSKYVNFLYLASHYEKLKGSPEDNEQKQLFVEQHKHYLDEIIEQISEFSKRVILADANLDKVLSAYNKHRDKPIREQAENIIHLFTLTNLGAPAAFKYFDTTIDRKRYTSTKEVLDATLIHQSITGLYETRIDLSQLGGDGGGSSEAAAKPAPGGTLGDQGSRGSDPLPEPRVTLTVEGIPTEFLVNTGAEHSVLTKPMGKMGSKRTVVAGATGSKVYPWTTKRLLKIGQKQVTHSFLVIPECPAPLLGRDLLTKLKAQIQFSTEGPQVTWEDRPAMCLVLNLEEEYRLHEKPVPPSIDPSWLQLFPMVWAEKAGMGLANQVPPVVVELKSDASPVAVRQYPMSKEAREGIRPHIQRFLDLGILVPCQSPWNTPLLPVKKPGTNDYRPVQDLREVNKRVQDIHPTVPNPYNLLSSLPPSHTWYSVLDLKDAFFCLKLHPNSQPLFAFEWRDPEKGNTGQLTWTRLPQGFKNSPTLFNEALHRDLASFRALNPQVVMLQYVDDLLVAAPTYRDCKEGTRRLLQELSKLGYRVSAKKAQLCREEVTYLGYLLKGGKRWLTPARKATVMKIPTPTTPRQVREFLGTAGFCRLWIPGFASLAAPLYPLTRPKVPFTWTEAHQEAFGRIKEALLSAPALALPDLTKPFALYVDEKEGVARGVLTQTLGPWRRPVAYLSKKLDPVASGWPTCLKAIAAVALLLKDADKLTLGQNVLVIAPHNLESIVRQPPDRWMTNARMTHYQSLLLNERVSFAPPAILNPATLLPVESDDTPIHICSEILAEETGTRPDLRDQPLPGVPAWYTDGSSFIMDGRRQAGAAIVDNKRTVWASNLPEGTSAQKAELIALTQALRLAEGKSINIYTDSRYAFATAHVHGAIYKQRGWLTSAGKDIKNKEEILALLEAIHLPKRVAIIHCPGHQRGTDPVATGNRKADEAAKQAAQSTRILTETTKNAGKRTADGSEFEKRTADGSEFESPKKKAKVE

SEQ ID NO: 7576 - protein, 2218 aa, synthetic construct
MPAAKRVKLDGGDKKYSIGLDIGTNSVGWAVITDEYKVPSKKFKVLGNTDRHSIKKNLIGALLFDSGETAEATRLKRTARRRYTRRKNRICYLQEIFSNEMAKVDDSFFHRLEESFLVEEDKKHERHPIFGNIVDEVAYHEKYPTIYHLRKKLVDSTDKADLRLIYLALAHMIKFRGHFLIEGDLNPDNSDVDKLFIQLVQTYNQLFEENPINASGVDAKAILSARLSKSRRLENLIAQLPGEKKNGLFGNLIALSLGLTPNFKSNFDLAEDAKLQLSKDTYDDDLDNLLAQIGDQYADLFLAAKNLSDAILLSDILRVNTEITKAPLSASMIKRYDEHHQDLTLLKALVRQQLPEKYKEIFFDQSKNGYAGYIDGGASQEEFYKFIKPILEKMDGTEELLVKLNREDLLRKQRTFDNGSIPHQIHLGELHAILRRQEDFYPFLKDNREKIEKILTFRIPYYVGPLARGNSRFAWMTRKSEETITPWNFEEVVDKGASAQSFIERMTNFDKNLPNEKVLPKHSLLYEYFTVYNELTKVKYVTEGMRKPAFLSGEQKKAIVDLLFKTNRKVTVKQLKEDYFKKIECFDSVEISGVEDRFNASLGTYHDLLKIIKDKDFLDNEENEDILEDIVLTLTLFEDREMIEERLKTYAHLFDDKVMKQLKRRRYTGWGRLSRKLINGIRDKQSGKTILDFLKSDGFANRNFMQLIHDDSLTFKEDIQKAQVSGQGDSLHEHIANLAGSPAIKKGILQTVKVVDELVKVMGRHKPENIVIEMARENQTTQKGQKNSRERMKRIEEGIKELGSQILKEHPVENTQLQNEKLYLYYLQNGRDMYVDQELDINRLSDYDVDHIVPQSFLKDDSIDNKVLTRSDKARGKSDNVPSEEVVKKMKNYWRQLLNAKLITQRKFDNLTKAERGGLSELDKAGFIKRQLVETRQITKHVAQILDSRMNTKYDENDKLIREVKVITLKSKLVSDFRKDFQFYKVREINNYHHAHDAYLNAVVGTALIKKYPKLESEFVYGDYKVYDVRKMIAKSEQEIGKATAKYFFYSNIMNFFKTEITLANGEIRKRPLIETNGETGEIVWDKGRDFATVRKVLSMPQVNIVKKTEVQTGGFSKESILPKRNSDKLIARKKDWDPKKYGGFDSPTVAYSVLVVAKVEKGKSKKLKSVKELLGITIMERSSFEKNPIDFLEAKGYKEVKKDLIIKLPKYSLFELENGRKRMLASAGELQKGNELALPSKYVNFLYLASHYEKLKGSPEDNEQKQLFVEQHKHYLDEIIEQISEFSKRVILADANLDKVLSAYNKHRDKPIREQAENIIHLFTLTNLGAPAAFKYFDTTIDRKRYTSTKEVLDATLIHQSITGLYETRIDLSQLGGDGGGSSEAAAKPAPGGTLGDQGSRGSDPLPEPRVTLTVEGIPTEFLVNTGAEHSVLTKPMGKMGSKRTVVAGATGSKVYPWTTKRLLKIGQKQVTHSFLVIPECPAPLLGRDLLTKLKAQIQFSTEGPQVTWEDRPAMCLVLNLEEEYRLHEKPVPPSIDPSWLQLFPMVWAEKAGMGLANQVPPVVVELKSDASPVAVRQYPMSKEAREGIRPHIQRFLDLGILVPCQSPWNTPLLPVKKPGTNDYRPVQDLREVNKRVQDIHPTVPNPYNLLSSLPPSHTWYSVLDLKDAFFCLKLHPNSQPLFAFEWRDPEKGNTGQLTWTRLPQGFKNSPTLFNEALHRDLASFRALNPQVVMLQYVDDLLVAAPTYRDCKEGTRRLLQELSKLGYRVSAKKAQLCREEVTYLGYLLKGGKRWLTPARKATVMKIPTPTTPRQVREFLGKAGFCRLFIPGFASLAAPLYPLTRPKVPFTWTEAHQEAFGRIKEALLSAPALALPDLTKPFALYVDEKEGVARGVLTQTLGPWRRPVAYLSKKLDPVASGWPTCLKAIAAVALLLKDADKLTLGQNVLVIAPHNLESIVRQPPDRWMTNARMTHYQSLLLNERVSFAPPAILNPATLLPVESDDTPIHICSEILAEETGTRPDLRDQPLPGVPAWYTDGSSFIMDGRRQAGAAIVDNKRTVWASNLPEGTSAQKAELIALTQALRLAEGKSINIYTDSRYAFATAHVHGAIYKQRGWLTSAGKDIKNKEEILALLEAIHLPKRVAIIHCPGHQRGTDPVATGNRKADEAAKQAAQSTRILTETTKNAGKRTADGSEFEKRTADGSEFESPKKKAKVE

SEQ ID NO: 7577 - protein, 2096 aa, synthetic construct
MPAAKRVKLDGGDKKYSIGLDIGTNSVGWAVITDEYKVPSKKFKVLGNTDRHSIKKNLIGALLFDSGETAEATRLKRTARRRYTRRKNRICYLQEIFSNEMAKVDDSFFHRLEESFLVEEDKKHERHPIFGNIVDEVAYHEKYPTIYHLRKKLVDSTDKADLRLIYLALAHMIKFRGHFLIEGDLNPDNSDVDKLFIQLVQTYNQLFEENPINASGVDAKAILSARLSKSRRLENLIAQLPGEKKNGLFGNLIALSLGLTPNFKSNFDLAEDAKLQLSKDTYDDDLDNLLAQIGDQYADLFLAAKNLSDAILLSDILRVNTEITKAPLSASMIKRYDEHHQDLTLLKALVRQQLPEKYKEIFFDQSKNGYAGYIDGGASQEEFYKFIKPILEKMDGTEELLVKLNREDLLRKQRTFDNGSIPHQIHLGELHAILRRQEDFYPFLKDNREKIEKILTFRIPYYVGPLARGNSRFAWMTRKSEETITPWNFEEVVDKGASAQSFIERMTNFDKNLPNEKVLPKHSLLYEYFTVYNELTKVKYVTEGMRKPAFLSGEQKKAIVDLLFKTNRKVTVKQLKEDYFKKIECFDSVEISGVEDRFNASLGTYHDLLKIIKDKDFLDNEENEDILEDIVLTLTLFEDREMIEERLKTYAHLFDDKVMKQLKRRRYTGWGRLSRKLINGIRDKQSGKTILDFLKSDGFANRNFMQLIHDDSLTFKEDIQKAQVSGQGDSLHEHIANLAGSPAIKKGILQTVKVVDELVKVMGRHKPENIVIEMARENQTTQKGQKNSRERMKRIEEGIKELGSQILKEHPVENTQLQNEKLYLYYLQNGRDMYVDQELDINRLSDYDVDHIVPQSFLKDDSIDNKVLTRSDKARGKSDNVPSEEVVKKMKNYWRQLLNAKLITQRKFDNLTKAERGGLSELDKAGFIKRQLVETRQITKHVAQILDSRMNTKYDENDKLIREVKVITLKSKLVSDFRKDFQFYKVREINNYHHAHDAYLNAVVGTALIKKYPKLESEFVYGDYKVYDVRKMIAKSEQEIGKATAKYFFYSNIMNFFKTEITLANGEIRKRPLIETNGETGEIVWDKGRDFATVRKVLSMPQVNIVKKTEVQTGGFSKESILPKRNSDKLIARKKDWDPKKYGGFDSPTVAYSVLVVAKVEKGKSKKLKSVKELLGITIMERSSFEKNPIDFLEAKGYKEVKKDLIIKLPKYSLFELENGRKRMLASAGELQKGNELALPSKYVNFLYLASHYEKLKGSPEDNEQKQLFVEQHKHYLDEIIEQISEFSKRVILADANLDKVLSAYNKHRDKPIREQAENIIHLFTLTNLGAPAAFKYFDTTIDRKRYTSTKEVLDATLIHQSITGLYETRIDLSQLGGDGGGSSEAAAKPAPGGTLNLEDEYRLYETSAEPEVSPGSTWLSDFPQAWAETGGMGLAVRQAPLIIPLKATSTPVSIKQYPMSQEAKLGIKPHIQRLLDQGILVPCQSPWNTPLLPVKKPGTNDYRPVQDLREVNKRVEDIHPTVPNPYNLLSGLPPSHRWYTVLDLKDAFFCLRLHPTSQPLFAFEWRDPGMGISGQLTWTRLPQGFKNSPTLFNEALHRDLADFRIQHPDLILLQYVDDILLAATSELDCQQGTRALLLTLGNLGYRASAKKAQLCQKQVKYLGYLLKEGQRWLTEARKETVMGQPTPKTPRQLREFLGTAGFCRLWIPGFAEMAAPLYPLTKPGTLFNWGPDQQKAYQEIKQALLTAPALGLPDLTKPFELFVDEKQGYAKGVLTQKLGPWRRPVAYLSKKLDPVAAGWPPCLRMVAAIAVLRKDAGKLTMGQPLVILAPHAVEALVKQPPDRWLSNARMTHYQAMLLDTDRVQFGPVVALNPATLLPLPEEGAPHDCLEILAETHGTRPDLTDQPIPDADHTWYTDGSSFLQEGQRKAGAAVTTETEVIWARALPAGTSAQRAELIALTQALKMAEGKRLNVYTDSRYAFATAHIHGEIYRRRGWLTSEGREIKNKSEILALLKALFLPKRLSIIHCLGHQKGDSAEARGNRLADQAAREAAIKTPPDTSTLLAGKRTADGSEFEKRTADGSEFESPKKKAKVE

SEQ ID NO: 7578 - protein, 2096 aa, synthetic construct
MPAAKRVKLDGGDKKYSIGLDIGTNSVGWAVITDEYKVPSKKFKVLGNTDRHSIKKNLIGALLFDSGETAEATRLKRTARRRYTRRKNRICYLQEIFSNEMAKVDDSFFHRLEESFLVEEDKKHERHPIFGNIVDEVAYHEKYPTIYHLRKKLVDSTDKADLRLIYLALAHMIKFRGHFLIEGDLNPDNSDVDKLFIQLVQTYNQLFEENPINASGVDAKAILSARLSKSRRLENLIAQLPGEKKNGLFGNLIALSLGLTPNFKSNFDLAEDAKLQLSKDTYDDDLDNLLAQIGDQYADLFLAAKNLSDAILLSDILRVNTEITKAPLSASMIKRYDEHHQDLTLLKALVRQQLPEKYKEIFFDQSKNGYAGYIDGGASQEEFYKFIKPILEKMDGTEELLVKLNREDLLRKQRTFDNGSIPHQIHLGELHAILRRQEDFYPFLKDNREKIEKILTFRIPYYVGPLARGNSRFAWMTRKSEETITPWNFEEVVDKGASAQSFIERMTNFDKNLPNEKVLPKHSLLYEYFTVYNELTKVKYVTEGMRKPAFLSGEQKKAIVDLLFKTNRKVTVKQLKEDYFKKIECFDSVEISGVEDRFNASLGTYHDLLKIIKDKDFLDNEENEDILEDIVLTLTLFEDREMIEERLKTYAHLFDDKVMKQLKRRRYTGWGRLSRKLINGIRDKQSGKTILDFLKSDGFANRNFMQLIHDDSLTFKEDIQKAQVSGQGDSLHEHIANLAGSPAIKKGILQTVKVVDELVKVMGRHKPENIVIEMARENQTTQKGQKNSRERMKRIEEGIKELGSQILKEHPVENTQLQNEKLYLYYLQNGRDMYVDQELDINRLSDYDVDHIVPQSFLKDDSIDNKVLTRSDKARGKSDNVPSEEVVKKMKNYWRQLLNAKLITQRKFDNLTKAERGGLSELDKAGFIKRQLVETRQITKHVAQILDSRMNTKYDENDKLIREVKVITLKSKLVSDFRKDFQFYKVREINNYHHAHDAYLNAVVGTALIKKYPKLESEFVYGDYKVYDVRKMIAKSEQEIGKATAKYFFYSNIMNFFKTEITLANGEIRKRPLIETNGETGEIVWDKGRDFATVRKVLSMPQVNIVKKTEVQTGGFSKESILPKRNSDKLIARKKDWDPKKYGGFDSPTVAYSVLVVAKVEKGKSKKLKSVKELLGITIMERSSFEKNPIDFLEAKGYKEVKKDLIIKLPKYSLFELENGRKRMLASAGELQKGNELALPSKYVNFLYLASHYEKLKGSPEDNEQKQLFVEQHKHYLDEIIEQISEFSKRVILADANLDKVLSAYNKHRDKPIREQAENIIHLFTLTNLGAPAAFKYFDTTIDRKRYTSTKEVLDATLIHQSITGLYETRIDLSQLGGDGGGSSEAAAKPAPGGTLNLEDEYRLYETSAEPEVSPGSTWLSDFPQAWAETGGMGLAVRQAPLIIPLKATSTPVSIKQYPMSQEAKLGIKPHIQRLLDQGILVPCQSPWNTPLLPVKKPGTNDYRPVQDLREVNKRVEDIHPTVPNPYNLLSGLPPSHRWYTVLDLKDAFFCLRLHPTSQPLFAFEWRDPGMGISGQLTWTRLPQGFKNSPTLFNEALHRDLADFRIQHPDLILLQYVDDILLAATSELDCQQGTRALLLTLGNLGYRASAKKAQLCQKQVKYLGYLLKEGQRWLTEARKETVMGQPTPKTPRQLREFLGKAGFCRLFIPGFAEMAAPLYPLTKPGTLFNWGPDQQKAYQEIKQALLTAPALGLPDLTKPFELFVDEKQGYAKGVLTQKLGPWRRPVAYLSKKLDPVAAGWPPCLRMVAAIAVLRKDAGKLTMGQPLVILAPHAVEALVKQPPDRWLSNARMTHYQAMLLDTDRVQFGPVVALNPATLLPLPEEGAPHDCLEILAETHGTRPDLTDQPIPDADHTWYTDGSSFLQEGQRKAGAAVTTETEVIWARALPAGTSAQRAELIALTQALKMAEGKRLNVYTDSRYAFATAHIHGEIYRRRGWLTSEGREIKNKSEILALLKALFLPKRLSIIHCLGHQKGDSAEARGNRLADQAAREAAIKTPPDTSTLLAGKRTADGSEFEKRTADGSEFESPKKKAKVE

SEQ ID NO: 7579 - protein, 2096 aa, synthetic construct
MPAAKRVKLDGGDKKYSIGLDIGTNSVGWAVITDEYKVPSKKFKVLGNTDRHSIKKNLIGALLFDSGETAEATRLKRTARRRYTRRKNRICYLQEIFSNEMAKVDDSFFHRLEESFLVEEDKKHERHPIFGNIVDEVAYHEKYPTIYHLRKKLVDSTDKADLRLIYLALAHMIKFRGHFLIEGDLNPDNSDVDKLFIQLVQTYNQLFEENPINASGVDAKAILSARLSKSRRLENLIAQLPGEKKNGLFGNLIALSLGLTPNFKSNFDLAEDAKLQLSKDTYDDDLDNLLAQIGDQYADLFLAAKNLSDAILLSDILRVNTEITKAPLSASMIKRYDEHHQDLTLLKALVRQQLPEKYKEIFFDQSKNGYAGYIDGGASQEEFYKFIKPILEKMDGTEELLVKLNREDLLRKQRTFDNGSIPHQIHLGELHAILRRQEDFYPFLKDNREKIEKILTFRIPYYVGPLARGNSRFAWMTRKSEETITPWNFEEVVDKGASAQSFIERMTNFDKNLPNEKVLPKHSLLYEYFTVYNELTKVKYVTEGMRKPAFLSGEQKKAIVDLLFKTNRKVTVKQLKEDYFKKIECFDSVEISGVEDRFNASLGTYHDLLKIIKDKDFLDNEENEDILEDIVLTLTLFEDREMIEERLKTYAHLFDDKVMKQLKRRRYTGWGRLSRKLINGIRDKQSGKTILDFLKSDGFANRNFMQLIHDDSLTFKEDIQKAQVSGQGDSLHEHIANLAGSPAIKKGILQTVKVVDELVKVMGRHKPENIVIEMARENQTTQKGQKNSRERMKRIEEGIKELGSQILKEHPVENTQLQNEKLYLYYLQNGRDMYVDQELDINRLSDYDVDHIVPQSFLKDDSIDNKVLTRSDKARGKSDNVPSEEVVKKMKNYWRQLLNAKLITQRKFDNLTKAERGGLSELDKAGFIKRQLVETRQITKHVAQILDSRMNTKYDENDKLIREVKVITLKSKLVSDFRKDFQFYKVREINNYHHAHDAYLNAVVGTALIKKYPKLESEFVYGDYKVYDVRKMIAKSEQEIGKATAKYFFYSNIMNFFKTEITLANGEIRKRPLIETNGETGEIVWDKGRDFATVRKVLSMPQVNIVKKTEVQTGGFSKESILPKRNSDKLIARKKDWDPKKYGGFDSPTVAYSVLVVAKVEKGKSKKLKSVKELLGITIMERSSFEKNPIDFLEAKGYKEVKKDLIIKLPKYSLFELENGRKRMLASAGELQKGNELALPSKYVNFLYLASHYEKLKGSPEDNEQKQLFVEQHKHYLDEIIEQISEFSKRVILADANLDKVLSAYNKHRDKPIREQAENIIHLFTLTNLGAPAAFKYFDTTIDRKRYTSTKEVLDATLIHQSITGLYETRIDLSQLGGDGGGSSEAAAKPAPGGTLGIEDEYRLHETSTEPDVSLGSTWLSDFPQAWAETGGMGLAVRQAPLIIPLKATSTPVSIQQYPMSHEARLGIKPHIQRLLDQGILVPCQSPWNTPLLPVKKPGTNDYRPVQDLREVNKRVEDIHPTVPNPYNLLSGLPPSHQWYTVLDLKDAFFCLRLHPTSQPLFAFEWRDPGMGISGQLTWTRLPQGFKNSPTLFDEALHRDLADFRIQHPDLILLQYVDDILLAATSELDCQQGTRALLQTLGDLGYRASAKKAQICQKQVKYLGYLLREGQRWLTEARKETVMGQPVPKTPRQLREFLGTAGFCRLWIPGFAEMAAPLYPLTKTGTLFSWGPDQQKAYQEIKQALLTAPALGLPDLTKPFELFVDEKQGYAKGVLTQKLGPWRRPVAYLSKKLDPVAAGWPPCLRMVAAIAVLTKDAGKLTMGQPLVILAPHAVEALVKQPPDRWLSNARMTHYQAMLLDTDRVQFGPVVALNPATLLPLPEEGAPHDCLEILAETHGTRPDLTDQPIPDADHTWYTDGSSFLQEGQRKAGAAVTTETEVIWAGALPAGTSAQRAELIALTQALKMAEGKRLNVYTDSRYAFATAHIHGEIYRRRGLLTSEGREIKNKSEILALLKALFLPKRLSIIHCLGHQKGDSAEARGNRLADQAAREAAIKTPPDTSTLLAGKRTADGSEFEKRTADGSEFESPKKKAKVE

SEQ ID NO: 7580 - protein, 2096 aa, synthetic construct
MPAAKRVKLDGGDKKYSIGLDIGTNSVGWAVITDEYKVPSKKFKVLGNTDRHSIKKNLIGALLFDSGETAEATRLKRTARRRYTRRKNRICYLQEIFSNEMAKVDDSFFHRLEESFLVEEDKKHERHPIFGNIVDEVAYHEKYPTIYHLRKKLVDSTDKADLRLIYLALAHMIKFRGHFLIEGDLNPDNSDVDKLFIQLVQTYNQLFEENPINASGVDAKAILSARLSKSRRLENLIAQLPGEKKNGLFGNLIALSLGLTPNFKSNFDLAEDAKLQLSKDTYDDDLDNLLAQIGDQYADLFLAAKNLSDAILLSDILRVNTEITKAPLSASMIKRYDEHHQDLTLLKALVRQQLPEKYKEIFFDQSKNGYAGYIDGGASQEEFYKFIKPILEKMDGTEELLVKLNREDLLRKQRTFDNGSIPHQIHLGELHAILRRQEDFYPFLKDNREKIEKILTFRIPYYVGPLARGNSRFAWMTRKSEETITPWNFEEVVDKGASAQSFIERMTNFDKNLPNEKVLPKHSLLYEYFTVYNELTKVKYVTEGMRKPAFLSGEQKKAIVDLLFKTNRKVTVKQLKEDYFKKIECFDSVEISGVEDRFNASLGTYHDLLKIIKDKDFLDNEENEDILEDIVLTLTLFEDREMIEERLKTYAHLFDDKVMKQLKRRRYTGWGRLSRKLINGIRDKQSGKTILDFLKSDGFANRNFMQLIHDDSLTFKEDIQKAQVSGQGDSLHEHIANLAGSPAIKKGILQTVKVVDELVKVMGRHKPENIVIEMARENQTTQKGQKNSRERMKRIEEGIKELGSQILKEHPVENTQLQNEKLYLYYLQNGRDMYVDQELDINRLSDYDVDHIVPQSFLKDDSIDNKVLTRSDKARGKSDNVPSEEVVKKMKNYWRQLLNAKLITQRKFDNLTKAERGGLSELDKAGFIKRQLVETRQITKHVAQILDSRMNTKYDENDKLIREVKVITLKSKLVSDFRKDFQFYKVREINNYHHAHDAYLNAVVGTALIKKYPKLESEFVYGDYKVYDVRKMIAKSEQEIGKATAKYFFYSNIMNFFKTEITLANGEIRKRPLIETNGETGEIVWDKGRDFATVRKVLSMPQVNIVKKTEVQTGGFSKESILPKRNSDKLIARKKDWDPKKYGGFDSPTVAYSVLVVAKVEKGKSKKLKSVKELLGITIMERSSFEKNPIDFLEAKGYKEVKKDLIIKLPKYSLFELENGRKRMLASAGELQKGNELALPSKYVNFLYLASHYEKLKGSPEDNEQKQLFVEQHKHYLDEIIEQISEFSKRVILADANLDKVLSAYNKHRDKPIREQAENIIHLFTLTNLGAPAAFKYFDTTIDRKRYTSTKEVLDATLIHQSITGLYETRIDLSQLGGDGGGSSEAAAKPAPGGTLNIEDEYRLHETSKEPDVSLGSTWLSDFPQAWAETGGMGLAVRQAPLIIPLKATSTPVSIKQYPMSQEARLGIKPHIQRLLDQGILVPCQSPWNTPLLPVKKPGTNDYRPVQDLREVNKRVEDIHPTVPNPYNLLSGLPPSHQWYTVLDLKDAFFCLRLHPTSQPLFAFEWRDPEMGISGQLTWTRLPQGFKNSPTLFNEALHRDLAGFRIQHPDLILLQYVDDLLLAATSELDCQQGTRALLQTLGDLGYRASAKKAQICQKQVKYLGYLLKEGQRWLTEARKETVMGQPIPKTPRQLREFLGTAGFCRLWIPGFAEMAAPLYPLTKPGTLFNWGPDQQKAFQEIKQALLTAPALGLPDLTKPFELFVDEKQGYAKGVLTQKLGPWRRPVAYLSKKLDPVAAGWPPCLRMVAAIAVLTKDAGKLTMGQPLVILAPHAVEALVKQPPDRWLSNARMTHYQALLLDTDRVQFGPVVALNPATLLPLPEEGLQHDCLDILAEAHGTRSDLMDQPLPDADHTWYTDGSSFLQEGQRKAGAAVTTETEVIWARALPAGTSAQRAELIALTQALKMAEGKKLNVYTDSRYAFATAHIHGEIYRRRGWLTSEGKEIKNKDEILALLKALFLPKRLSIIHCPGHQKGNSAEARGNRMADQAAREVATRETPETSTLLAGKRTADGSEFEKRTADGSEFESPKKKAKVE

SEQ ID NO: 7581 - protein, 2096 aa, synthetic construct
MPAAKRVKLDGGDKKYSIGLDIGTNSVGWAVITDEYKVPSKKFKVLGNTDRHSIKKNLIGALLFDSGETAEATRLKRTARRRYTRRKNRICYLQEIFSNEMAKVDDSFFHRLEESFLVEEDKKHERHPIFGNIVDEVAYHEKYPTIYHLRKKLVDSTDKADLRLIYLALAHMIKFRGHFLIEGDLNPDNSDVDKLFIQLVQTYNQLFEENPINASGVDAKAILSARLSKSRRLENLIAQLPGEKKNGLFGNLIALSLGLTPNFKSNFDLAEDAKLQLSKDTYDDDLDNLLAQIGDQYADLFLAAKNLSDAILLSDILRVNTEITKAPLSASMIKRYDEHHQDLTLLKALVRQQLPEKYKEIFFDQSKNGYAGYIDGGASQEEFYKFIKPILEKMDGTEELLVKLNREDLLRKQRTFDNGSIPHQIHLGELHAILRRQEDFYPFLKDNREKIEKILTFRIPYYVGPLARGNSRFAWMTRKSEETITPWNFEEVVDKGASAQSFIERMTNFDKNLPNEKVLPKHSLLYEYFTVYNELTKVKYVTEGMRKPAFLSGEQKKAIVDLLFKTNRKVTVKQLKEDYFKKIECFDSVEISGVEDRFNASLGTYHDLLKIIKDKDFLDNEENEDILEDIVLTLTLFEDREMIEERLKTYAHLFDDKVMKQLKRRRYTGWGRLSRKLINGIRDKQSGKTILDFLKSDGFANRNFMQLIHDDSLTFKEDIQKAQVSGQGDSLHEHIANLAGSPAIKKGILQTVKVVDELVKVMGRHKPENIVIEMARENQTTQKGQKNSRERMKRIEEGIKELGSQILKEHPVENTQLQNEKLYLYYLQNGRDMYVDQELDINRLSDYDVDHIVPQSFLKDDSIDNKVLTRSDKARGKSDNVPSEEVVKKMKNYWRQLLNAKLITQRKFDNLTKAERGGLSELDKAGFIKRQLVETRQITKHVAQILDSRMNTKYDENDKLIREVKVITLKSKLVSDFRKDFQFYKVREINNYHHAHDAYLNAVVGTALIKKYPKLESEFVYGDYKVYDVRKMIAKSEQEIGKATAKYFFYSNIMNFFKTEITLANGEIRKRPLIETNGETGEIVWDKGRDFATVRKVLSMPQVNIVKKTEVQTGGFSKESILPKRNSDKLIARKKDWDPKKYGGFDSPTVAYSVLVVAKVEKGKSKKLKSVKELLGITIMERSSFEKNPIDFLEAKGYKEVKKDLIIKLPKYSLFELENGRKRMLASAGELQKGNELALPSKYVNFLYLASHYEKLKGSPEDNEQKQLFVEQHKHYLDEIIEQISEFSKRVILADANLDKVLSAYNKHRDKPIREQAENIIHLFTLTNLGAPAAFKYFDTTIDRKRYTSTKEVLDATLIHQSITGLYETRIDLSQLGGDGGGSSEAAAKPAPGGTLNIEDEYRLHEISTEPDVSPGSTWLSDFPQAWAETGGMGLAVRQAPLIIPLKATSTPVSIKQYPMSQEAKLGIKPHIQRLLDQGILVPCQSPWNTPLLPVKKPGTNDYRPVQGLREVNKRVEDIHPTVPNPYNLLSGLPTSHRWYTVLDLKDAFFCLRLHPTSQPLFASEWRDPGMGISGQLTWTRLPQGFKNSPTLFNEALHRGLADFRIQHPDLILLQYVDDLLLAATSELDCQQGTRALLKTLGNLGYRASAKKAQICQKQVKYLGYLLREGQRWLTEARKETVMGQPTPKTPRQLREFLGKAGFCRLFIPRFAEMAAPLYPLTKPGTLFNWGPDQQKAYHEIKQALLTAPALGLPDLTKPFELFVDEKQGYAKGVLTQKLGPWRRPVAYLSKKLDPVAAGWPPCLRMVAAIAVLTKDAGKLTMGQPLVILAPHAVEALVKQPPDRWLSNARMTHYQAMLLDTDRVQFGPVVALNPATLLPLPEEGAPHDCLEILAETHGTEPDLTDQPIPDADHTWYTDGSSFLQEGQRKAGAAVTTETEVIWARALPAGTSAQRAELIALTQALKMAEGKRLNVYTDSRYAFATAHIHGEIYKRRGWLTSEGREIKNKSEILALLKALFLPKRLSIIHCLGHQKGDSAEARGNRLADQAAREAAIKTPPDTSTLLAGKRTADGSEFEKRTADGSEFESPKKKAKVE

SEQ ID NO: 7582 - protein, 2090 aa, synthetic construct
MPAAKRVKLDGGDKKYSIGLDIGTNSVGWAVITDEYKVPSKKFKVLGNTDRHSIKKNLIGALLFDSGETAEATRLKRTARRRYTRRKNRICYLQEIFSNEMAKVDDSFFHRLEESFLVEEDKKHERHPIFGNIVDEVAYHEKYPTIYHLRKKLVDSTDKADLRLIYLALAHMIKFRGHFLIEGDLNPDNSDVDKLFIQLVQTYNQLFEENPINASGVDAKAILSARLSKSRRLENLIAQLPGEKKNGLFGNLIALSLGLTPNFKSNFDLAEDAKLQLSKDTYDDDLDNLLAQIGDQYADLFLAAKNLSDAILLSDILRVNTEITKAPLSASMIKRYDEHHQDLTLLKALVRQQLPEKYKEIFFDQSKNGYAGYIDGGASQEEFYKFIKPILEKMDGTEELLVKLNREDLLRKQRTFDNGSIPHQIHLGELHAILRRQEDFYPFLKDNREKIEKILTFRIPYYVGPLARGNSRFAWMTRKSEETITPWNFEEVVDKGASAQSFIERMTNFDKNLPNEKVLPKHSLLYEYFTVYNELTKVKYVTEGMRKPAFLSGEQKKAIVDLLFKTNRKVTVKQLKEDYFKKIECFDSVEISGVEDRFNASLGTYHDLLKIIKDKDFLDNEENEDILEDIVLTLTLFEDREMIEERLKTYAHLFDDKVMKQLKRRRYTGWGRLSRKLINGIRDKQSGKTILDFLKSDGFANRNFMQLIHDDSLTFKEDIQKAQVSGQGDSLHEHIANLAGSPAIKKGILQTVKVVDELVKVMGRHKPENIVIEMARENQTTQKGQKNSRERMKRIEEGIKELGSQILKEHPVENTQLQNEKLYLYYLQNGRDMYVDQELDINRLSDYDVDHIVPQSFLKDDSIDNKVLTRSDKARGKSDNVPSEEVVKKMKNYWRQLLNAKLITQRKFDNLTKAERGGLSELDKAGFIKRQLVETRQITKHVAQILDSRMNTKYDENDKLIREVKVITLKSKLVSDFRKDFQFYKVREINNYHHAHDAYLNAVVGTALIKKYPKLESEFVYGDYKVYDVRKMIAKSEQEIGKATAKYFFYSNIMNFFKTEITLANGEIRKRPLIETNGETGEIVWDKGRDFATVRKVLSMPQVNIVKKTEVQTGGFSKESILPKRNSDKLIARKKDWDPKKYGGFDSPTVAYSVLVVAKVEKGKSKKLKSVKELLGITIMERSSFEKNPIDFLEAKGYKEVKKDLIIKLPKYSLFELENGRKRMLASAGELQKGNELALPSKYVNFLYLASHYEKLKGSPEDNEQKQLFVEQHKHYLDEIIEQISEFSKRVILADANLDKVLSAYNKHRDKPIREQAENIIHLFTLTNLGAPAAFKYFDTTIDRKRYTSTKEVLDATLIHQSITGLYETRIDLSQLGGDGGGSSEAAAKPAPGGTLQLDDEYRLYSPLVKPDQNIQFWLEQFPQAWAETAGMGLAKQVPPQVIQLKASATPVSVRQYPLSKEAQEGIRPHVQRLIQQGILVPVQSPWNTPLLPVRKPGTNDYRPVQDLREVNKRVQDIHPTVPNPYNLLCALPPQRSWYTVLDLKDAFFCLRLHPTSQPLFAFEWRDPGTGRTGQLTWTRLPQGFKNSPTIFDEALHRDLANFRIQHPQVTLLQYVDDLLLAGATKQDCLEGTKALLLELSDLGYRASAKKAQICRREVTYLGYSLRDGQRWLTEARKKTVVQIPAPTTAKQVREFLGTAGFCRLWIPGFATLAAPLYPLTKEKGEFSWAPEHQKAFDAIKKALLSAPALALPDVTKPFTLYVDERKGVARGVLTQTLGPWRRPVAYLSKKLDPVASGWPVCLKAIAAVAILVKDADKLTLGQNITVIAPHALENIVRQPPDRWMTNARMTHYQSLLLTERVTFAPPAALNPATLLPEETDEPVTHDCHQLLIEETGVRKDLTDIPLTGEVLTWFTDGSSYVVEGKRMAGAAVVDGTRTIWASSLPEGTSAQKAELMALTQALRLAEGKSINIYTDSRYAFATAHVHGAIYKQRGLLTSAGREIKNKEEILSLLEALHLPKRLAIIHCPGHQKAKDPISRGNQMADRVAKQAAQGVNLLAGKRTADGSEFEKRTADGSEFESPKKKAKVE

SEQ ID NO: 7583 - protein, 2176 aa, synthetic construct
MPAAKRVKLDGGDKKYSIGLDIGTNSVGWAVITDEYKVPSKKFKVLGNTDRHSIKKNLIGALLFDSGETAEATRLKRTARRRYTRRKNRICYLQEIFSNEMAKVDDSFFHRLEESFLVEEDKKHERHPIFGNIVDEVAYHEKYPTIYHLRKKLVDSTDKADLRLIYLALAHMIKFRGHFLIEGDLNPDNSDVDKLFIQLVQTYNQLFEENPINASGVDAKAILSARLSKSRRLENLIAQLPGEKKNGLFGNLIALSLGLTPNFKSNFDLAEDAKLQLSKDTYDDDLDNLLAQIGDQYADLFLAAKNLSDAILLSDILRVNTEITKAPLSASMIKRYDEHHQDLTLLKALVRQQLPEKYKEIFFDQSKNGYAGYIDGGASQEEFYKFIKPILEKMDGTEELLVKLNREDLLRKQRTFDNGSIPHQIHLGELHAILRRQEDFYPFLKDNREKIEKILTFRIPYYVGPLARGNSRFAWMTRKSEETITPWNFEEVVDKGASAQSFIERMTNFDKNLPNEKVLPKHSLLYEYFTVYNELTKVKYVTEGMRKPAFLSGEQKKAIVDLLFKTNRKVTVKQLKEDYFKKIECFDSVEISGVEDRFNASLGTYHDLLKIIKDKDFLDNEENEDILEDIVLTLTLFEDREMIEERLKTYAHLFDDKVMKQLKRRRYTGWGRLSRKLINGIRDKQSGKTILDFLKSDGFANRNFMQLIHDDSLTFKEDIQKAQVSGQGDSLHEHIANLAGSPAIKKGILQTVKVVDELVKVMGRHKPENIVIEMARENQTTQKGQKNSRERMKRIEEGIKELGSQILKEHPVENTQLQNEKLYLYYLQNGRDMYVDQELDINRLSDYDVDHIVPQSFLKDDSIDNKVLTRSDKARGKSDNVPSEEVVKKMKNYWRQLLNAKLITQRKFDNLTKAERGGLSELDKAGFIKRQLVETRQITKHVAQILDSRMNTKYDENDKLIREVKVITLKSKLVSDFRKDFQFYKVREINNYHHAHDAYLNAVVGTALIKKYPKLESEFVYGDYKVYDVRKMIAKSEQEIGKATAKYFFYSNIMNFFKTEITLANGEIRKRPLIETNGETGEIVWDKGRDFATVRKVLSMPQVNIVKKTEVQTGGFSKESILPKRNSDKLIARKKDWDPKKYGGFDSPTVAYSVLVVAKVEKGKSKKLKSVKELLGITIMERSSFEKNPIDFLEAKGYKEVKKDLIIKLPKYSLFELENGRKRMLASAGELQKGNELALPSKYVNFLYLASHYEKLKGSPEDNEQKQLFVEQHKHYLDEIIEQISEFSKRVILADANLDKVLSAYNKHRDKPIREQAENIIHLFTLTNLGAPAAFKYFDTTIDRKRYTSTKEVLDATLIHQSITGLYETRIDLSQLGGDGGGSSEAAAKPAPGGMDPLQLLQPLEAEIKGTKLKAHWNSGATITCVPQAFLEEEVPIKNIWIKTIHGEKEQPVYYLTFKIQGRKVEAEVISSPYDYILVSPSDIPWLMKKPLQLTTLVPLQEYEERLLKQTMLTGSYKEKLQSLFLKYDALWQHWENQVGHRRIKPHHIATGTVNPRPQKQYPINPKAKASIQTVINDLLKQGVLIQQNSIMNTPVYPVPKPDGKWRMVLDYREVNKTIPLIAAQNQHSAGILSSIFRGKYKTTLDLSNGFWAHSITPESYWLTAFTWLGQQYCWTRLPQGFLNSPALFNADVVDLLKEVPNVQVYVDDIYISHDDPREHLEQLEKVFSLLLNAGYVVSLKKSEIAQHEVEFLGFNITKEGRGLTETFKQKLLNITPPRDLKQLQSILGKLNFARNFIPNFSELVKPLYNIIATAPGKYITWTTDNSQQLQNIISMLNSAENLEERNPEVRLIMKVNTSPSAGYIRFYNEFAKRPIMYLNYVYTKAEVKFTNTEKLLTTIHKGLIKALDLGMGQEILVYSPIVSMTKIQKTPLPERKALPIRWITWMSYLEDPRIQFHYDKTLPELQQVPTVTDDIIAKIKHPSEFSMVFYTDGSAIKHPNVNKSHNAGMGIAQVQFKPEFTVINTWSIPLGDHTAQLAEVAAVEFACKKALKIDGPVLIVTDSFYVAESVNKELPYWQSNGFFNNKKKPLKHVSKWKSIADCIQLKPDIIIIHEKGHQPTASTFHTEGNNLADKLATQGSYVVNAGKRTADGSEFEKRTADGSEFESPKKKAKVE

SEQ ID NO: 7584 - protein, 2094 aa, synthetic construct
MPAAKRVKLDGGDKKYSIGLDIGTNSVGWAVITDEYKVPSKKFKVLGNTDRHSIKKNLIGALLFDSGETAEATRLKRTARRRYTRRKNRICYLQEIFSNEMAKVDDSFFHRLEESFLVEEDKKHERHPIFGNIVDEVAYHEKYPTIYHLRKKLVDSTDKADLRLIYLALAHMIKFRGHFLIEGDLNPDNSDVDKLFIQLVQTYNQLFEENPINASGVDAKAILSARLSKSRRLENLIAQLPGEKKNGLFGNLIALSLGLTPNFKSNFDLAEDAKLQLSKDTYDDDLDNLLAQIGDQYADLFLAAKNLSDAILLSDILRVNTEITKAPLSASMIKRYDEHHQDLTLLKALVRQQLPEKYKEIFFDQSKNGYAGYIDGGASQEEFYKFIKPILEKMDGTEELLVKLNREDLLRKQRTFDNGSIPHQIHLGELHAILRRQEDFYPFLKDNREKIEKILTFRIPYYVGPLARGNSRFAWMTRKSEETITPWNFEEVVDKGASAQSFIERMTNFDKNLPNEKVLPKHSLLYEYFTVYNELTKVKYVTEGMRKPAFLSGEQKKAIVDLLFKTNRKVTVKQLKEDYFKKIECFDSVEISGVEDRFNASLGTYHDLLKIIKDKDFLDNEENEDILEDIVLTLTLFEDREMIEERLKTYAHLFDDKVMKQLKRRRYTGWGRLSRKLINGIRDKQSGKTILDFLKSDGFANRNFMQLIHDDSLTFKEDIQKAQVSGQGDSLHEHIANLAGSPAIKKGILQTVKVVDELVKVMGRHKPENIVIEMARENQTTQKGQKNSRERMKRIEEGIKELGSQILKEHPVENTQLQNEKLYLYYLQNGRDMYVDQELDINRLSDYDVDHIVPQSFLKDDSIDNKVLTRSDKARGKSDNVPSEEVVKKMKNYWRQLLNAKLITQRKFDNLTKAERGGLSELDKAGFIKRQLVETRQITKHVAQILDSRMNTKYDENDKLIREVKVITLKSKLVSDFRKDFQFYKVREINNYHHAHDAYLNAVVGTALIKKYPKLESEFVYGDYKVYDVRKMIAKSEQEIGKATAKYFFYSNIMNFFKTEITLANGEIRKRPLIETNGETGEIVWDKGRDFATVRKVLSMPQVNIVKKTEVQTGGFSKESILPKRNSDKLIARKKDWDPKKYGGFDSPTVAYSVLVVAKVEKGKSKKLKSVKELLGITIMERSSFEKNPIDFLEAKGYKEVKKDLIIKLPKYSLFELENGRKRMLASAGELQKGNELALPSKYVNFLYLASHYEKLKGSPEDNEQKQLFVEQHKHYLDEIIEQISEFSKRVILADANLDKVLSAYNKHRDKPIREQAENIIHLFTLTNLGAPAAFKYFDTTIDRKRYTSTKEVLDATLIHQSITGLYETRIDLSQLGGDGGGSSEAAAKPAPGGVLNLEEEYRLHEKPVPSSIDPSWLQLFPTVWAERAGMGLANQVPPVVVELRSGASPVAVRQYPMSKEAREGIRPHIQRFLDLGVLVPCQSPWNTPLLPVKKPGTNDYRPVQDLREINKRVQDIHPTVPNPYNLLSSLPPSHTWYSVLDLKDAFFCLKLHPNSQPLFAFEWRDPEKGNTGQLTWTRLPQGFKNSPTLFDEALHRDLAPFRALNPQVVLLQYVDDLLVAAPTYRDCKEGTQKLLQELSKLGYRVSAKKAQLCQKEVTYLGYLLKEGKRWLTPARKATVMKIPPPTTPRQVREFLGTAGFCRLWIPGFASLAAPLYPLTKESIPFIWTEEHQKAFDRIKEALLSAPALALPDLTKPFTLYVDERAGVARGVLTQTLGPWRRPVAYLSKKLDPVASGWPTCLKAVAAVALLLKDADKLTLGQNVTVIASHSLESIVRQPPDRWMTNARMTHYQSLLLNERVSFAPPAVLNPATLLPVESEATPVHRCSEILAEETGTRRDLKDQPLPGVPAWYTDGSSFIAEGKRRAGAAIVDGKRTVWASSLPEGTSAQKAELVALTQALRLAEGKDINIYTDSRYAFATAHIHGAIYKQRGLLTSAGKDIKNKEEILALLEAIHLPKRVAIIHCPGHQKGNDPVATGNRRADEAAKQAALSTRVLAETTKPAGKRTADGSEFEKRTADGSEFESPKKKAKVE

SEQ ID NO: 7585 - protein, 2094 aa, synthetic construct
MPAAKRVKLDGGDKKYSIGLDIGTNSVGWAVITDEYKVPSKKFKVLGNTDRHSIKKNLIGALLFDSGETAEATRLKRTARRRYTRRKNRICYLQEIFSNEMAKVDDSFFHRLEESFLVEEDKKHERHPIFGNIVDEVAYHEKYPTIYHLRKKLVDSTDKADLRLIYLALAHMIKFRGHFLIEGDLNPDNSDVDKLFIQLVQTYNQLFEENPINASGVDAKAILSARLSKSRRLENLIAQLPGEKKNGLFGNLIALSLGLTPNFKSNFDLAEDAKLQLSKDTYDDDLDNLLAQIGDQYADLFLAAKNLSDAILLSDILRVNTEITKAPLSASMIKRYDEHHQDLTLLKALVRQQLPEKYKEIFFDQSKNGYAGYIDGGASQEEFYKFIKPILEKMDGTEELLVKLNREDLLRKQRTFDNGSIPHQIHLGELHAILRRQEDFYPFLKDNREKIEKILTFRIPYYVGPLARGNSRFAWMTRKSEETITPWNFEEVVDKGASAQSFIERMTNFDKNLPNEKVLPKHSLLYEYFTVYNELTKVKYVTEGMRKPAFLSGEQKKAIVDLLFKTNRKVTVKQLKEDYFKKIECFDSVEISGVEDRFNASLGTYHDLLKIIKDKDFLDNEENEDILEDIVLTLTLFEDREMIEERLKTYAHLFDDKVMKQLKRRRYTGWGRLSRKLINGIRDKQSGKTILDFLKSDGFANRNFMQLIHDDSLTFKEDIQKAQVSGQGDSLHEHIANLAGSPAIKKGILQTVKVVDELVKVMGRHKPENIVIEMARENQTTQKGQKNSRERMKRIEEGIKELGSQILKEHPVENTQLQNEKLYLYYLQNGRDMYVDQELDINRLSDYDVDHIVPQSFLKDDSIDNKVLTRSDKARGKSDNVPSEEVVKKMKNYWRQLLNAKLITQRKFDNLTKAERGGLSELDKAGFIKRQLVETRQITKHVAQILDSRMNTKYDENDKLIREVKVITLKSKLVSDFRKDFQFYKVREINNYHHAHDAYLNAVVGTALIKKYPKLESEFVYGDYKVYDVRKMIAKSEQEIGKATAKYFFYSNIMNFFKTEITLANGEIRKRPLIETNGETGEIVWDKGRDFATVRKVLSMPQVNIVKKTEVQTGGFSKESILPKRNSDKLIARKKDWDPKKYGGFDSPTVAYSVLVVAKVEKGKSKKLKSVKELLGITIMERSSFEKNPIDFLEAKGYKEVKKDLIIKLPKYSLFELENGRKRMLASAGELQKGNELALPSKYVNFLYLASHYEKLKGSPEDNEQKQLFVEQHKHYLDEIIEQISEFSKRVILADANLDKVLSAYNKHRDKPIREQAENIIHLFTLTNLGAPAAFKYFDTTIDRKRYTSTKEVLDATLIHQSITGLYETRIDLSQLGGDGGGSSEAAAKPAPGGVLNLEEEYRLHEKPVPSSIDPSWLQLFPTVWAERAGMGLANQVPPVVVELRSGASPVAVRQYPMSKEAREGIRPHIQRFLDLGVLVPCQSPWNTPLLPVKKPGTNDYRPVQDLREINKRVQDIHPTVPNPYNLLSSLPPSHTWYSVLDLKDAFFCLKLHPNSQPLFAFEWRDPEKGNTGQLTWTRLPQGFKNSPTLFNEALHRDLAPFRALNPQVVLLQYVDDLLVAAPTYRDCKEGTQKLLQELSKLGYRVSAKKAQLCQKEVTYLGYLLKEGKRWLTPARKATVMKIPPPTTPRQVREFLGTAGFCRLWIPGFASLAAPLYPLTKPSIPFIWTEEHQKAFDRIKEALLSAPALALPDLTKPFTLYVDERAGVARGVLTQTLGPWRRPVAYLSKKLDPVASGWPTCLKAVAAVALLLKDADKLTLGQNVTVIASHSLESIVRQPPDRWMTNARMTHYQSLLLNERVSFAPPAVLNPATLLPVESEATPVHRCSEILAEETGTRRDLKDQPLPGVPAWYTDGSSFIAEGKRRAGAAIVDGKRTVWASSLPEGTSAQKAELVALTQALRLAEGKDINIYTDSRYAFATAHIHGAIYKQRGWLTSAGKDIKNKEEILALLEAIHLPKRVAIIHCPGHQKGNDPVATGNRRADEAAKQAALSTRVLAETTKPAGKRTADGSEFEKRTADGSEFESPKKKAKVE

SEQ ID NO: 7586 - protein, 2094 aa, synthetic construct
MPAAKRVKLDGGDKKYSIGLDIGTNSVGWAVITDEYKVPSKKFKVLGNTDRHSIKKNLIGALLFDSGETAEATRLKRTARRRYTRRKNRICYLQEIFSNEMAKVDDSFFHRLEESFLVEEDKKHERHPIFGNIVDEVAYHEKYPTIYHLRKKLVDSTDKADLRLIYLALAHMIKFRGHFLIEGDLNPDNSDVDKLFIQLVQTYNQLFEENPINASGVDAKAILSARLSKSRRLENLIAQLPGEKKNGLFGNLIALSLGLTPNFKSNFDLAEDAKLQLSKDTYDDDLDNLLAQIGDQYADLFLAAKNLSDAILLSDILRVNTEITKAPLSASMIKRYDEHHQDLTLLKALVRQQLPEKYKEIFFDQSKNGYAGYIDGGASQEEFYKFIKPILEKMDGTEELLVKLNREDLLRKQRTFDNGSIPHQIHLGELHAILRRQEDFYPFLKDNREKIEKILTFRIPYYVGPLARGNSRFAWMTRKSEETITPWNFEEVVDKGASAQSFIERMTNFDKNLPNEKVLPKHSLLYEYFTVYNELTKVKYVTEGMRKPAFLSGEQKKAIVDLLFKTNRKVTVKQLKEDYFKKIECFDSVEISGVEDRFNASLGTYHDLLKIIKDKDFLDNEENEDILEDIVLTLTLFEDREMIEERLKTYAHLFDDKVMKQLKRRRYTGWGRLSRKLINGIRDKQSGKTILDFLKSDGFANRNFMQLIHDDSLTFKEDIQKAQVSGQGDSLHEHIANLAGSPAIKKGILQTVKVVDELVKVMGRHKPENIVIEMARENQTTQKGQKNSRERMKRIEEGIKELGSQILKEHPVENTQLQNEKLYLYYLQNGRDMYVDQELDINRLSDYDVDHIVPQSFLKDDSIDNKVLTRSDKARGKSDNVPSEEVVKKMKNYWRQLLNAKLITQRKFDNLTKAERGGLSELDKAGFIKRQLVETRQITKHVAQILDSRMNTKYDENDKLIREVKVITLKSKLVSDFRKDFQFYKVREINNYHHAHDAYLNAVVGTALIKKYPKLESEFVYGDYKVYDVRKMIAKSEQEIGKATAKYFFYSNIMNFFKTEITLANGEIRKRPLIETNGETGEIVWDKGRDFATVRKVLSMPQVNIVKKTEVQTGGFSKESILPKRNSDKLIARKKDWDPKKYGGFDSPTVAYSVLVVAKVEKGKSKKLKSVKELLGITIMERSSFEKNPIDFLEAKGYKEVKKDLIIKLPKYSLFELENGRKRMLASAGELQKGNELALPSKYVNFLYLASHYEKLKGSPEDNEQKQLFVEQHKHYLDEIIEQISEFSKRVILADANLDKVLSAYNKHRDKPIREQAENIIHLFTLTNLGAPAAFKYFDTTIDRKRYTSTKEVLDATLIHQSITGLYETRIDLSQLGGDGGGSSEAAAKPAPGGVLNLEEEYRLHEKPVPSSIDPSWLQLFPTVWAERAGMGLANQVPPVVVELRSGASPVAVRQYPMSKEAREGIRPHIQRFLDLGVLVPCQSPWNTPLLPVKKPGTNDYRPVQDLREINKRVQDIHPTVPNPYNLLSSLPPSHTWYSVLDLKDAFFCLKLHPNSQPLFAFEWRDPEKGNTGQLTWTRLPQGFKNSPTLFNEALHRDLAPFRALNPQVVLLQYVDDLLVAAPTYRDCKEGTQKLLQELSKLGYRVSAKKAQLCQKEVTYLGYLLKEGKRWLTPARKATVMKIPPPTTPRQVREFLGKAGFCRLFIPGFASLAAPLYPLTKPSIPFIWTEEHQKAFDRIKEALLSAPALALPDLTKPFTLYVDERAGVARGVLTQTLGPWRRPVAYLSKKLDPVASGWPTCLKAVAAVALLLKDADKLTLGQNVTVIASHSLESIVRQPPDRWMTNARMTHYQSLLLNERVSFAPPAVLNPATLLPVESEATPVHRCSEILAEETGTRRDLKDQPLPGVPAWYTDGSSFIAEGKRRAGAAIVDGKRTVWASSLPEGTSAQKAELVALTQALRLAEGKDINIYTDSRYAFATAHIHGAIYKQRGWLTSAGKDIKNKEEILALLEAIHLPKRVAIIHCPGHQKGNDPVATGNRRADEAAKQAALSTRVLAETTKPAGKRTADGSEFEKRTADGSEFESPKKKAKVE

SEQ ID NO: 7587 - protein, 2096 aa, synthetic construct; identical to SEQ ID NO: 4538

SEQ ID NO: 7588 - protein, 2098 aa, synthetic construct; identical to SEQ ID NO: 4539

SEQ ID NO: 7589 - protein, 2173 aa, synthetic construct
MPAAKRVKLDGGDKKYSIGLDIGTNSVGWAVITDEYKVPSKKFKVLGNTDRHSIKKNLIGALLFDSGETAEATRLKRTARRRYTRRKNRICYLQEIFSNEMAKVDDSFFHRLEESFLVEEDKKHERHPIFGNIVDEVAYHEKYPTIYHLRKKLVDSTDKADLRLIYLALAHMIKFRGHFLIEGDLNPDNSDVDKLFIQLVQTYNQLFEENPINASGVDAKAILSARLSKSRRLENLIAQLPGEKKNGLFGNLIALSLGLTPNFKSNFDLAEDAKLQLSKDTYDDDLDNLLAQIGDQYADLFLAAKNLSDAILLSDILRVNTEITKAPLSASMIKRYDEHHQDLTLLKALVRQQLPEKYKEIFFDQSKNGYAGYIDGGASQEEFYKFIKPILEKMDGTEELLVKLNREDLLRKQRTFDNGSIPHQIHLGELHAILRRQEDFYPFLKDNREKIEKILTFRIPYYVGPLARGNSRFAWMTRKSEETITPWNFEEVVDKGASAQSFIERMTNFDKNLPNEKVLPKHSLLYEYFTVYNELTKVKYVTEGMRKPAFLSGEQKKAIVDLLFKTNRKVTVKQLKEDYFKKIECFDSVEISGVEDRFNASLGTYHDLLKIIKDKDFLDNEENEDILEDIVLTLTLFEDREMIEERLKTYAHLFDDKVMKQLKRRRYTGWGRLSRKLINGIRDKQSGKTILDFLKSDGFANRNFMQLIHDDSLTFKEDIQKAQVSGQGDSLHEHIANLAGSPAIKKGILQTVKVVDELVKVMGRHKPENIVIEMARENQTTQKGQKNSRERMKRIEEGIKELGSQILKEHPVENTQLQNEKLYLYYLQNGRDMYVDQELDINRLSDYDVDHIVPQSFLKDDSIDNKVLTRSDKARGKSDNVPSEEVVKKMKNYWRQLLNAKLITQRKFDNLTKAERGGLSELDKAGFIKRQLVETRQITKHVAQILDSRMNTKYDENDKLIREVKVITLKSKLVSDFRKDFQFYKVREINNYHHAHDAYLNAVVGTALIKKYPKLESEFVYGDYKVYDVRKMIAKSEQEIGKATAKYFFYSNIMNFFKTEITLANGEIRKRPLIETNGETGEIVWDKGRDFATVRKVLSMPQVNIVKKTEVQTGGFSKESILPKRNSDKLIARKKDWDPKKYGGFDSPTVAYSVLVVAKVEKGKSKKLKSVKELLGITIMERSSFEKNPIDFLEAKGYKEVKKDLIIKLPKYSLFELENGRKRMLASAGELQKGNELALPSKYVNFLYLASHYEKLKGSPEDNEQKQLFVEQHKHYLDEIIEQISEFSKRVILADANLDKVLSAYNKHRDKPIREQAENIIHLFTLTNLGAPAAFKYFDTTIDRKRYTSTKEVLDATLIHQSITGLYETRIDLSQLGGDGGGSSPAPEAAAKGGMDLLKPLTVERKGVKIKGYWNSQADITCVPKDLLQGEEPVRQQNVTTIHGTQEGDVYYVNLKIDGRRINTEVIGTTLDYAIITPGDVPWILKKPLELTIKLDLEEQQGTLLNNSILSKKGKEELKQLFEKYSALWQSWENQVGHRRIRPHKIATGTVKPTPQKQYHINPKAKPDIQIVINDLLKQGVLIQKESTMNTPVYPVPKPNGRWRMVLDYRAVNKVTPLIAVQNQHSYGILGSLFKGRYKTTIDLSNGFWAHPIVPEDYWITAFTWQGKQYCWTVLPQGFLNSPGLFTGDVVDLLQGIPNVEVYVDDVYISHDSEKEHLEYLDILFNRLKEAGYIISLKKSNIANSIVDFLGFQITNEGRGLTDTFKEKLENITAPTTLKQLQSILGLLNFARNFIPDFTELIAPLYALIPKSTKNYVPWQIEHSTTLETLITKLNGAEYLQGRKGDKTLIMKVNASYTTGYIRYYNEGEKKPISYVSIVFSKTELKFTELEKLLTTVHKGLLKALDLSMGQNIHVYSPIVSMQNIQKTPQTAKKALASRWLSWLSYLEDPRIRFFYDPQMPALKDLPAVDTGKDNKKHPSNFQHIFYTDGSAITSPTKEGHLNAGMGIVYFINKDGNLQKQQEWSISLGNHTAQFAEIAAFEFALKKCLPLGGNILVVTDSNYVAKAYNEELDVWASNGFVNNRKKPLKHISKWKSVADLKRLRPDVVVTHEPGHQKLDSSPHAYGNNLADQLATQASFKVHAGKRTADGSEFEKRTADGSEFESPKKKAKVE

SEQ ID NO: 7590 - protein, 2127 aa, synthetic construct
MPAAKRVKLDGGDKKYSIGLDIGTNSVGWAVITDEYKVPSKKFKVLGNTDRHSIKKNLIGALLFDSGETAEATRLKRTARRRYTRRKNRICYLQEIFSNEMAKVDDSFFHRLEESFLVEEDKKHERHPIFGNIVDEVAYHEKYPTIYHLRKKLVDSTDKADLRLIYLALAHMIKFRGHFLIEGDLNPDNSDVDKLFIQLVQTYNQLFEENPINASGVDAKAILSARLSKSRRLENLIAQLPGEKKNGLFGNLIALSLGLTPNFKSNFDLAEDAKLQLSKDTYDDDLDNLLAQIGDQYADLFLAAKNLSDAILLSDILRVNTEITKAPLSASMIKRYDEHHQDLTLLKALVRQQLPEKYKEIFFDQSKNGYAGYIDGGASQEEFYKFIKPILEKMDGTEELLVKLNREDLLRKQRTFDNGSIPHQIHLGELHAILRRQEDFYPFLKDNREKIEKILTFRIPYYVGPLARGNSRFAWMTRKSEETITPWNFEEVVDKGASAQSFIERMTNFDKNLPNEKVLPKHSLLYEYFTVYNELTKVKYVTEGMRKPAFLSGEQKKAIVDLLFKTNRKVTVKQLKEDYFKKIECFDSVEISGVEDRFNASLGTYHDLLKIIKDKDFLDNEENEDILEDIVLTLTLFEDREMIEERLKTYAHLFDDKVMKQLKRRRYTGWGRLSRKLINGIRDKQSGKTILDFLKSDGFANRNFMQLIHDDSLTFKEDIQKAQVSGQGDSLHEHIANLAGSPAIKKGILQTVKVVDELVKVMGRHKPENIVIEMARENQTTQKGQKNSRERMKRIEEGIKELGSQILKEHPVENTQLQNEKLYLYYLQNGRDMYVDQELDINRLSDYDVDHIVPQSFLKDDSIDNKVLTRSDKARGKSDNVPSEEVVKKMKNYWRQLLNAKLITQRKFDNLTKAERGGLSELDKAGFIKRQLVETRQITKHVAQILDSRMNTKYDENDKLIREVKVITLKSKLVSDFRKDFQFYKVREINNYHHAHDAYLNAVVGTALIKKYPKLESEFVYGDYKVYDVRKMIAKSEQEIGKATAKYFFYSNIMNFFKTEITLANGEIRKRPLIETNGETGEIVWDKGRDFATVRKVLSMPQVNIVKKTEVQTGGFSKESILPKRNSDKLIARKKDWDPKKYGGFDSPTVAYSVLVVAKVEKGKSKKLKSVKELLGITIMERSSFEKNPIDFLEAKGYKEVKKDLIIKLPKYSLFELENGRKRMLASAGELQKGNELALPSKYVNFLYLASHYEKLKGSPEDNEQKQLFVEQHKHYLDEIIEQISEFSKRVILADANLDKVLSAYNKHRDKPIREQAENIIHLFTLTNLGAPAAFKYFDTTIDRKRYTSTKEVLDATLIHQSITGLYETRIDLSQLGGDGGGSSPAPEAAAKGGLLGRDLLTKLKAQIQFSTEGPQVTWEDRPAMCLVLNLEEEYRLHEKPVPPSIDPSWLQLFPMVWAEKAGMGLANQVPPVVVELKSDASPVAVRQYPMSKEAREGIRPHIQRFLDLGILVPCQSPWNTPLLPVKKPGTNDYRPVQDLREVNKRVQDIHPTVPNPYNLLSSLPPSHTWYSVLDLKDAFFCLKLHPNSQPLFAFEWRDPEKGNTGQLTWTRLPQGFKNSPTLFNEALHRDLASFRALNPQVVMLQYVDDLLVAAPTYRDCKEGTRRLLQELSKLGYRVSAKKAQLCREEVTYLGYLLKGGKRWLTPARKATVMKIPTPTTPRQVREFLGTAGFCRLWIPGFASLAAPLYPLTRPKVPFTWTEAHQEAFGRIKEALLSAPALALPDLTKPFALYVDEKEGVARGVLTQTLGPWRRPVAYLSKKLDPVASGWPTCLKAIAAVALLLKDADKLTLGQNVLVIAPHNLESIVRQPPDRWMTNARMTHYQSLLLNERVSFAPPAILNPATLLPVESDDTPIHICSEILAEETGTRPDLRDQPLPGVPAWYTDGSSFIMDGRRQAGAAIVDNKRTVWASNLPEGTSAQKAELIALTQALRLAEGKSINIYTDSRYAFATAHVHGAIYKQRGWLTSAGKDIKNKEEILALLEAIHLPKRVAIIHCPGHQRGTDPVATGNRKADEAAKQAAQSTRILTETTKNAGKRTADGSEFEKRTADGSEFESPKKKAKVE

SEQ ID NO: 7591 - protein, 2218 aa, synthetic construct
MPAAKRVKLDGGDKKYSIGLDIGTNSVGWAVITDEYKVPSKKFKVLGNTDRHSIKKNLIGALLFDSGETAEATRLKRTARRRYTRRKNRICYLQEIFSNEMAKVDDSFFHRLEESFLVEEDKKHERHPIFGNIVDEVAYHEKYPTIYHLRKKLVDSTDKADLRLIYLALAHMIKFRGHFLIEGDLNPDNSDVDKLFIQLVQTYNQLFEENPINASGVDAKAILSARLSKSRRLENLIAQLPGEKKNGLFGNLIALSLGLTPNFKSNFDLAEDAKLQLSKDTYDDDLDNLLAQIGDQYADLFLAAKNLSDAILLSDILRVNTEITKAPLSASMIKRYDEHHQDLTLLKALVRQQLPEKYKEIFFDQSKNGYAGYIDGGASQEEFYKFIKPILEKMDGTEELLVKLNREDLLRKQRTFDNGSIPHQIHLGELHAILRRQEDFYPFLKDNREKIEKILTFRIPYYVGPLARGNSRFAWMTRKSEETITPWNFEEVVDKGASAQSFIERMTNFDKNLPNEKVLPKHSLLYEYFTVYNELTKVKYVTEGMRKPAFLSGEQKKAIVDLLFKTNRKVTVKQLKEDYFKKIECFDSVEISGVEDRFNASLGTYHDLLKIIKDKDFLDNEENEDILEDIVLTLTLFEDREMIEERLKTYAHLFDDKVMKQLKRRRYTGWGRLSRKLINGIRDKQSGKTILDFLKSDGFANRNFMQLIHDDSLTFKEDIQKAQVSGQGDSLHEHIANLAGSPAIKKGILQTVKVVDELVKVMGRHKPENIVIEMARENQTTQKGQKNSRERMKRIEEGIKELGSQILKEHPVENTQLQNEKLYLYYLQNGRDMYVDQELDINRLSDYDVDHIVPQSFLKDDSIDNKVLTRSDKARGKSDNVPSEEVVKKMKNYWRQLLNAKLITQRKFDNLTKAERGGLSELDKAGFIKRQLVETRQITKHVAQILDSRMNTKYDENDKLIREVKVITLKSKLVSDFRKDFQFYKVREINNYHHAHDAYLNAVVGTALIKKYPKLESEFVYGDYKVYDVRKMIAKSEQEIGKATAKYFFYSNIMNFFKTEITLANGEIRKRPLIETNGETGEIVWDKGRDFATVRKVLSMPQVNIVKKTEVQTGGFSKESILPKRNSDKLIARKKDWDPKKYGGFDSPTVAYSVLVVAKVEKGKSKKLKSVKELLGITIMERSSFEKNPIDFLEAKGYKEVKKDLIIKLPKYSLFELENGRKRMLASAGELQKGNELALPSKYVNFLYLASHYEKLKGSPEDNEQKQLFVEQHKHYLDEIIEQISEFSKRVILADANLDKVLSAYNKHRDKPIREQAENIIHLFTLTNLGAPAAFKYFDTTIDRKRYTSTKEVLDATLIHQSITGLYETRIDLSQLGGDGGGSSPAPEAAAKGGTLGDQGSRGSDPLPEPRVTLTVEGIPTEFLVNTGAEHSVLTKPMGKMGSKRTVVAGATGSKVYPWTTKRLLKIGQKQVTHSFLVIPECPAPLLGRDLLTKLKAQIQFSTEGPQVTWEDRPAMCLVLNLEEEYRLHEKPVPPSIDPSWLQLFPMVWAEKAGMGLANQVPPVVVELKSDASPVAVRQYPMSKEAREGIRPHIQRFLDLGILVPCQSPWNTPLLPVKKPGTNDYRPVQDLREVNKRVQDIHPTVPNPYNLLSSLPPSHTWYSVLDLKDAFFCLKLHPNSQPLFAFEWRDPEKGNTGQLTWTRLPQGFKNSPTLFNEALHRDLASFRALNPQVVMLQYVDDLLVAAPTYRDCKEGTRRLLQELSKLGYRVSAKKAQLCREEVTYLGYLLKGGKRWLTPARKATVMKIPTPTTPRQVREFLGTAGFCRLWIPGFASLAAPLYPLTRPKVPFTWTEAHQEAFGRIKEALLSAPALALPDLTKPFALYVDEKEGVARGVLTQTLGPWRRPVAYLSKKLDPVASGWPTCLKAIAAVALLLKDADKLTLGQNVLVIAPHNLESIVRQPPDRWMTNARMTHYQSLLLNERVSFAPPAILNPATLLPVESDDTPIHICSEILAEETGTRPDLRDQPLPGVPAWYTDGSSFIMDGRRQAGAAIVDNKRTVWASNLPEGTSAQKAELIALTQALRLAEGKSINIYTDSRYAFATAHVHGAIYKQRGWLTSAGKDIKNKEEILALLEAIHLPKRVAIIHCPGHQRGTDPVATGNRKADEAAKQAAQSTRILTETTKNAGKRTADGSEFEKRTADGSEFESPKKKAKVE

SEQ ID NO: 7592 - protein, 2096 aa, synthetic construct
MPAAKRVKLDGGDKKYSIGLDIGTNSVGWAVITDEYKVPSKKFKVLGNTDRHSIKKNLIGALLFDSGETAEATRLKRTARRRYTRRKNRICYLQEIFSNEMAKVDDSFFHRLEESFLVEEDKKHERHPIFGNIVDEVAYHEKYPTIYHLRKKLVDSTDKADLRLIYLALAHMIKFRGHFLIEGDLNPDNSDVDKLFIQLVQTYNQLFEENPINASGVDAKAILSARLSKSRRLENLIAQLPGEKKNGLFGNLIALSLGLTPNFKSNFDLAEDAKLQLSKDTYDDDLDNLLAQIGDQYADLFLAAKNLSDAILLSDILRVNTEITKAPLSASMIKRYDEHHQDLTLLKALVRQQLPEKYKEIFFDQSKNGYAGYIDGGASQEEFYKFIKPILEKMDGTEELLVKLNREDLLRKQRTFDNGSIPHQIHLGELHAILRRQEDFYPFLKDNREKIEKILTFRIPYYVGPLARGNSRFAWMTRKSEETITPWNFEEVVDKGASAQSFIERMTNFDKNLPNEKVLPKHSLLYEYFTVYNELTKVKYVTEGMRKPAFLSGEQKKAIVDLLFKTNRKVTVKQLKEDYFKKIECFDSVEISGVEDRFNASLGTYHDLLKIIKDKDFLDNEENEDILEDIVLTLTLFEDREMIEERLKTYAHLFDDKVMKQLKRRRYTGWGRLSRKLINGIRDKQSGKTILDFLKSDGFANRNFMQLIHDDSLTFKEDIQKAQVSGQGDSLHEHIANLAGSPAIKKGILQTVKVVDELVKVMGRHKPENIVIEMARENQTTQKGQKNSRERMKRIEEGIKELGSQILKEHPVENTQLQNEKLYLYYLQNGRDMYVDQELDINRLSDYDVDHIVPQSFLKDDSIDNKVLTRSDKARGKSDNVPSEEVVKKMKNYWRQLLNAKLITQRKFDNLTKAERGGLSELDKAGFIKRQLVETRQITKHVAQILDSRMNTKYDENDKLIREVKVITLKSKLVSDFRKDFQFYKVREINNYHHAHDAYLNAVVGTALIKKYPKLESEFVYGDYKVYDVRKMIAKSEQEIGKATAKYFFYSNIMNFFKTEITLANGEIRKRPLIETNGETGEIVWDKGRDFATVRKVLSMPQVNIVKKTEVQTGGFSKESILPKRNSDKLIARKKDWDPKKYGGFDSPTVAYSVLVVAKVEKGKSKKLKSVKELLGITIMERSSFEKNPIDFLEAKGYKEVKKDLIIKLPKYSLFELENGRKRMLASAGELQKGNELALPSKYVNFLYLASHYEKLKGSPEDNEQKQLFVEQHKHYLDEIIEQISEFSKRVILADANLDKVLSAYNKHRDKPIREQAENIIHLFTLTNLGAPAAFKYFDTTIDRKRYTSTKEVLDATLIHQSITGLYETRIDLSQLGGDGGGSSPAPEAAAKGGTLGIEDEYRLHETSTEPDVSLGSTWLSDFPQAWAETGGMGLAVRQAPLIIPLKATSTPVSIQQYPMSHEARLGIKPHIQRLLDQGILVPCQSPWNTPLLPVKKPGTNDYRPVQDLREVNKRVEDIHPTVPNPYNLLSGLPPSHQWYTVLDLKDAFFCLRLHPTSQPLFAFEWRDPGMGISGQLTWTRLPQGFKNSPTLFNEALHRDLADFRIQHPDLILLQYVDDILLAATSELDCQQGTRALLQTLGDLGYRASAKKAQICQKQVKYLGYLLREGQRWLTEARKETVMGQPVPKTPRQLREFLGTAGFCRLWIPGFAEMAAPLYPLTKPGTLFSWGPDQQKAYQEIKQALLTAPALGLPDLTKPFELFVDEKQGYAKGVLTQKLGPWRRPVAYLSKKLDPVAAGWPPCLRMVAAIAVLTKDAGKLTMGQPLVILAPHAVEALVKQPPDRWLSNARMTHYQAMLLDTDRVQFGPVVALNPATLLPLPEEGAPHDCLEILAETHGTRPDLTDQPIPDADHTWYTDGSSFLQEGQRKAGAAVTTETEVIWAGALPAGTSAQRAELIALTQALKMAEGKRLNVYTDSRYAFATAHIHGEIYRRRGWLTSEGREIKNKSEILALLKALFLPKRLSIIHCLGHQKGDSAEARGNRLADQAAREAAIKTPPDTSTLLAGKRTADGSEFEKRTADGSEFESPKKKAKVE

SEQ ID NO: 7593 - protein, 2096 aa, synthetic construct
MPAAKRVKLDGGDKKYSIGLDIGTNSVGWAVITDEYKVPSKKFKVLGNTDRHSIKKNLIGALLFDSGETAEATRLKRTARRRYTRRKNRICYLQEIFSNEMAKVDDSFFHRLEESFLVEEDKKHERHPIFGNIVDEVAYHEKYPTIYHLRKKLVDSTDKADLRLIYLALAHMIKFRGHFLIEGDLNPDNSDVDKLFIQLVQTYNQLFEENPINASGVDAKAILSARLSKSRRLENLIAQLPGEKKNGLFGNLIALSLGLTPNFKSNFDLAEDAKLQLSKDTYDDDLDNLLAQIGDQYADLFLAAKNLSDAILLSDILRVNTEITKAPLSASMIKRYDEHHQDLTLLKALVRQQLPEKYKEIFFDQSKNGYAGYIDGGASQEEFYKFIKPILEKMDGTEELLVKLNREDLLRKQRTFDNGSIPHQIHLGELHAILRRQEDFYPFLKDNREKIEKILTFRIPYYVGPLARGNSRFAWMTRKSEETITPWNFEEVVDKGASAQSFIERMTNFDKNLPNEKVLPKHSLLYEYFTVYNELTKVKYVTEGMRKPAFLSGEQKKAIVDLLFKTNRKVTVKQLKEDYFKKIECFDSVEISGVEDRFNASLGTYHDLLKIIKDKDFLDNEENEDILEDIVLTLTLFEDREMIEERLKTYAHLFDDKVMKQLKRRRYTGWGRLSRKLINGIRDKQSGKTILDFLKSDGFANRNFMQLIHDDSLTFKEDIQKAQVSGQGDSLHEHIANLAGSPAIKKGILQTVKVVDELVKVMGRHKPENIVIEMARENQTTQKGQKNSRERMKRIEEGIKELGSQILKEHPVENTQLQNEKLYLYYLQNGRDMYVDQELDINRLSDYDVDHIVPQSFLKDDSIDNKVLTRSDKARGKSDNVPSEEVVKKMKNYWRQLLNAKLITQRKFDNLTKAERGGLSELDKAGFIKRQLVETRQITKHVAQILDSRMNTKYDENDKLIREVKVITLKSKLVSDFRKDFQFYKVREINNYHHAHDAYLNAVVGTALIKKYPKLESEFVYGDYKVYDVRKMIAKSEQEIGKATAKYFFYSNIMNFFKTEITLANGEIRKRPLIETNGETGEIVWDKGRDFATVRKVLSMPQVNIVKKTEVQTGGFSKESILPKRNSDKLIARKKDWDPKKYGGFDSPTVAYSVLVVAKVEKGKSKKLKSVKELLGITIMERSSFEKNPIDFLEAKGYKEVKKDLIIKLPKYSLFELENGRKRMLASAGELQKGNELALPSKYVNFLYLASHYEKLKGSPEDNEQKQLFVEQHKHYLDEIIEQISEFSKRVILADANLDKVLSAYNKHRDKPIREQAENIIHLFTLTNLGAPAAFKYFDTTIDRKRYTSTKEVLDATLIHQSITGLYETRIDLSQLGGDGGGSSPAPEAAAKGGTLNIEDEHRLHETSKEPDVSLGSTWLSDFPQAWAETGGMGLAVRQAPLIIPLKATSTPVSIKQYPMSQEARLGIKPHIQRLLDQGILVPCQSPWNTPLLPVKKPGTNDYRPVQDLREVNKRVEDIHPTVPNPYNLLSGLPPSHQWYTVLDLKDAFFCLRLHPTSQPLFAFEWRDPEMGISGQLTWTRLPQGFKNSPTLFDEALHRDLADFRIQHPDLILLQYVDDLLLAATSELDCQQGTRALLQTLGNLGYRASAKKAQICQKQVKYLGYLLKEGQRWLTEARKETVMGQPTPKTPRQLREFLGTAGFCRLWIPGFAEMAAPLYPLTKTGTLFNWGPDQQKAYQEIKQALLTAPALGLPDLTKPFELFVDEKQGYAKGVLTQKLGPWRRPVAYLSKKLDPVAAGWPPCLRMVAAIAVLTKDAGKLTMGQPLVILAPHAVEALVKQPPDRWLSNARMTHYQALLLDTDRVQFGPVVALNPATLLPLPEEGLQHNCLDILAEAHGTRPDLTDQPLPDADHTWYTDGSSLLQEGQRKAGAAVTTETEVIWAKALPAGTSAQRAELIALTQALKMAEGKKLNVYTDSRYAFATAHIHGEIYRRRGLLTSEGKEIKNKDEILALLKALFLPKRLSIIHCPGHQKGHSAEARGNRMADQAARKAAITETPDTSTLLAGKRTADGSEFEKRTADGSEFESPKKKAKVE

SEQ ID NO: 7594 - protein, 2096 aa, synthetic construct; identical to SEQ ID NO: 7593

SEQ ID NO: 7595 - protein, 2096 aa, synthetic construct
MPAAKRVKLDGGDKKYSIGLDIGTNSVGWAVITDEYKVPSKKFKVLGNTDRHSIKKNLIGALLFDSGETAEATRLKRTARRRYTRRKNRICYLQEIFSNEMAKVDDSFFHRLEESFLVEEDKKHERHPIFGNIVDEVAYHEKYPTIYHLRKKLVDSTDKADLRLIYLALAHMIKFRGHFLIEGDLNPDNSDVDKLFIQLVQTYNQLFEENPINASGVDAKAILSARLSKSRRLENLIAQLPGEKKNGLFGNLIALSLGLTPNFKSNFDLAEDAKLQLSKDTYDDDLDNLLAQIGDQYADLFLAAKNLSDAILLSDILRVNTEITKAPLSASMIKRYDEHHQDLTLLKALVRQQLPEKYKEIFFDQSKNGYAGYIDGGASQEEFYKFIKPILEKMDGTEELLVKLNREDLLRKQRTFDNGSIPHQIHLGELHAILRRQEDFYPFLKDNREKIEKILTFRIPYYVGPLARGNSRFAWMTRKSEETITPWNFEEVVDKGASAQSFIERMTNFDKNLPNEKVLPKHSLLYEYFTVYNELTKVKYVTEGMRKPAFLSGEQKKAIVDLLFKTNRKVTVKQLKEDYFKKIECFDSVEISGVEDRFNASLGTYHDLLKIIKDKDFLDNEENEDILEDIVLTLTLFEDREMIEERLKTYAHLFDDKVMKQLKRRRYTGWGRLSRKLINGIRDKQSGKTILDFLKSDGFANRNFMQLIHDDSLTFKEDIQKAQVSGQGDSLHEHIANLAGSPAIKKGILQTVKVVDELVKVMGRHKPENIVIEMARENQTTQKGQKNSRERMKRIEEGIKELGSQILKEHPVENTQLQNEKLYLYYLQNGRDMYVDQELDINRLSDYDVDHIVPQSFLKDDSIDNKVLTRSDKARGKSDNVPSEEVVKKMKNYWRQLLNAKLITQRKFDNLTKAERGGLSELDKAGFIKRQLVETRQITKHVAQILDSRMNTKYDENDKLIREVKVITLKSKLVSDFRKDFQFYKVREINNYHHAHDAYLNAVVGTALIKKYPKLESEFVYGDYKVYDVRKMIAKSEQEIGKATAKYFFYSNIMNFFKTEITLANGEIRKRPLIETNGETGEIVWDKGRDFATVRKVLSMPQVNIVKKTEVQTGGFSKESILPKRNSDKLIARKKDWDPKKYGGFDSPTVAYSVLVVAKVEKGKSKKLKSVKELLGITIMERSSFEKNPIDFLEAKGYKEVKKDLIIKLPKYSLFELENGRKRMLASAGELQKGNELALPSKYVNFLYLASHYEKLKGSPEDNEQKQLFVEQHKHYLDEIIEQISEFSKRVILADANLDKVLSAYNKHRDKPIREQAENIIHLFTLTNLGAPAAFKYFDTTIDRKRYTSTKEVLDATLIHQSITGLYETRIDLSQLGGDGGGSSPAPEAAAKGGTLNIEDEYRLHEISTEPDVSPGSTWLSDFPQAWAETGGMGLAVRQAPLIIPLKATSTPVSIKQYPMSQEAKLGIKPHIQRLLDQGILVPCQSPWNTPLLPVKKPGTNDYRPVQGLREVNKRVEDIHPTVPNPYNLLSGLPTSHRWYTVLDLKDAFFCLRLHPTSQPLFASEWRDPGMGISGQLTWTRLPQGFKNSPTLFNEALHRGLADFRIQHPDLILLQYVDDLLLAATSELDCQQGTRALLKTLGNLGYRASAKKAQICQKQVKYLGYLLREGQRWLTEARKETVMGQPTPKTPRQLREFLGTAGFCRLWIPRFAEMAAPLYPLTKPGTLFNWGPDQQKAYHEIKQALLTAPALGLPDLTKPFELFVDEKQGYAKGVLTQKLGPWRRPVAYLSKKLDPVAAGWPPCLRMVAAIAVLTKDAGKLTMGQPLVILAPHAVEALVKQPPDRWLSNARMTHYQAMLLDTDRVQFGPVVALNPATLLPLPEEGAPHDCLEILAETHGTEPDLTDQPIPDADHTWYTDGSSFLQEGQRKAGAAVTTETEVIWARALPAGTSAQRAELIALTQALKMAEGKRLNVYTDSRYAFATAHIHGEIYKRRGWLTSEGREIKNKSEILALLKALFLPKRLSIIHCLGHQKGDSAEARGNRLADQAAREAAIKTPPDTSTLLAGKRTADGSEFEKRTADGSEFESPKKKAKVE

SEQ ID NO: 7596 - protein, 2090 aa, synthetic construct
MPAAKRVKLDGGDKKYSIGLDIGTNSVGWAVITDEYKVPSKKFKVLGNTDRHSIKKNLIGALLFDSGETAEATRLKRTARRRYTRRKNRICYLQEIFSNEMAKVDDSFFHRLEESFLVEEDKKHERHPIFGNIVDEVAYHEKYPTIYHLRKKLVDSTDKADLRLIYLALAHMIKFRGHFLIEGDLNPDNSDVDKLFIQLVQTYNQLFEENPINASGVDAKAILSARLSKSRRLENLIAQLPGEKKNGLFGNLIALSLGLTPNFKSNFDLAEDAKLQLSKDTYDDDLDNLLAQIGDQYADLFLAAKNLSDAILLSDILRVNTEITKAPLSASMIKRYDEHHQDLTLLKALVRQQLPEKYKEIFFDQSKNGYAGYIDGGASQEEFYKFIKPILEKMDGTEELLVKLNREDLLRKQRTFDNGSIPHQIHLGELHAILRRQEDFYPFLKDNREKIEKILTFRIPYYVGPLARGNSRFAWMTRKSEETITPWNFEEVVDKGASAQSFIERMTNFDKNLPNEKVLPKHSLLYEYFTVYNELTKVKYVTEGMRKPAFLSGEQKKAIVDLLFKTNRKVTVKQLKEDYFKKIECFDSVEISGVEDRFNASLGTYHDLLKIIKDKDFLDNEENEDILEDIVLTLTLFEDREMIEERLKTYAHLFDDKVMKQLKRRRYTGWGRLSRKLINGIRDKQSGKTILDFLKSDGFANRNFMQLIHDDSLTFKEDIQKAQVSGQGDSLHEHIANLAGSPAIKKGILQTVKVVDELVKVMGRHKPENIVIEMARENQTTQKGQKNSRERMKRIEEGIKELGSQILKEHPVENTQLQNEKLYLYYLQNGRDMYVDQELDINRLSDYDVDHIVPQSFLKDDSIDNKVLTRSDKARGKSDNVPSEEVVKKMKNYWRQLLNAKLITQRKFDNLTKAERGGLSELDKAGFIKRQLVETRQITKHVAQILDSRMNTKYDENDKLIREVKVITLKSKLVSDFRKDFQFYKVREINNYHHAHDAYLNAVVGTALIKKYPKLESEFVYGDYKVYDVRKMIAKSEQEIGKATAKYFFYSNIMNFFKTEITLANGEIRKRPLIETNGETGEIVWDKGRDFATVRKVLSMPQVNIVKKTEVQTGGFSKESILPKRNSDKLIARKKDWDPKKYGGFDSPTVAYSVLVVAKVEKGKSKKLKSVKELLGITIMERSSFEKNPIDFLEAKGYKEVKKDLIIKLPKYSLFELENGRKRMLASAGELQKGNELALPSKYVNFLYLASHYEKLKGSPEDNEQKQLFVEQHKHYLDEIIEQISEFSKRVILADANLDKVLSAYNKHRDKPIREQAENIIHLFTLTNLGAPAAFKYFDTTIDRKRYTSTKEVLDATLIHQSITGLYETRIDLSQLGGDGGGSSPAPEAAAKGGTLQLDDEYRLYSPLVKPDQNIQFWLEQFPQAWAETAGMGLAKQVPPQVIQLKASATPVSVRQYPLSKEAQEGIRPHVQRLIQQGILVPVQSPWNTPLLPVRKPGTNDYRPVQDLREVNKRVQDIHPTVPNPYNLLCALPPQRSWYTVLDLKDAFFCLRLHPTSQPLFAFEWRDPGTGRTGQLTWTRLPQGFKNSPTIFDEALHRDLANFRIQHPQVTLLQYVDDLLLAGATKQDCLEGTKALLLELSDLGYRASAKKAQICRREVTYLGYSLRDGQRWLTEARKKTVVQIPAPTTAKQVREFLGTAGFCRLWIPGFATLAAPLYPLTKEKGEFSWAPEHQKAFDAIKKALLSAPALALPDVTKPFTLYVDERKGVARGVLTQTLGPWRRPVAYLSKKLDPVASGWPVCLKAIAAVAILVKDADKLTLGQNITVIAPHALENIVRQPPDRWMTNARMTHYQSLLLTERVTFAPPAALNPATLLPEETDEPVTHDCHQLLIEETGVRKDLTDIPLTGEVLTWFTDGSSYVVEGKRMAGAAVVDGTRTIWASSLPEGTSAQKAELMALTQALRLAEGKSINIYTDSRYAFATAHVHGAIYKQRGLLTSAGREIKNKEEILSLLEALHLPKRLAIIHCPGHQKAKDPISRGNQMADRVAKQAAQGVNLLAGKRTADGSEFEKRTADGSEFESPKKKAKVE

SEQ ID NO: 7597 - protein, 2090 aa, synthetic construct; identical to SEQ ID NO: 7596

SEQ ID NO: 7598 - protein, 2176 aa, synthetic construct
MPAAKRVKLDGGDKKYSIGLDIGTNSVGWAVITDEYKVPSKKFKVLGNTDRHSIKKNLIGALLFDSGETAEATRLKRTARRRYTRRKNRICYLQEIFSNEMAKVDDSFFHRLEESFLVEEDKKHERHPIFGNIVDEVAYHEKYPTIYHLRKKLVDSTDKADLRLIYLALAHMIKFRGHFLIEGDLNPDNSDVDKLFIQLVQTYNQLFEENPINASGVDAKAILSARLSKSRRLENLIAQLPGEKKNGLFGNLIALSLGLTPNFKSNFDLAEDAKLQLSKDTYDDDLDNLLAQIGDQYADLFLAAKNLSDAILLSDILRVNTEITKAPLSASMIKRYDEHHQDLTLLKALVRQQLPEKYKEIFFDQSKNGYAGYIDGGASQEEFYKFIKPILEKMDGTEELLVKLNREDLLRKQRTFDNGSIPHQIHLGELHAILRRQEDFYPFLKDNREKIEKILTFRIPYYVGPLARGNSRFAWMTRKSEETITPWNFEEVVDKGASAQSFIERMTNFDKNLPNEKVLPKHSLLYEYFTVYNELTKVKYVTEGMRKPAFLSGEQKKAIVDLLFKTNRKVTVKQLKEDYFKKIECFDSVEISGVEDRFNASLGTYHDLLKIIKDKDFLDNEENEDILEDIVLTLTLFEDREMIEERLKTYAHLFDDKVMKQLKRRRYTGWGRLSRKLINGIRDKQSGKTILDFLKSDGFANRNFMQLIHDDSLTFKEDIQKAQVSGQGDSLHEHIANLAGSPAIKKGILQTVKVVDELVKVMGRHKPENIVIEMARENQTTQKGQKNSRERMKRIEEGIKELGSQILKEHPVENTQLQNEKLYLYYLQNGRDMYVDQELDINRLSDYDVDHIVPQSFLKDDSIDNKVLTRSDKARGKSDNVPSEEVVKKMKNYWRQLLNAKLITQRKFDNLTKAERGGLSELDKAGFIKRQLVETRQITKHVAQILDSRMNTKYDENDKLIREVKVITLKSKLVSDFRKDFQFYKVREINNYHHAHDAYLNAVVGTALIKKYPKLESEFVYGDYKVYDVRKMIAKSEQEIGKATAKYFFYSNIMNFFKTEITLANGEIRKRPLIETNGETGEIVWDKGRDFATVRKVLSMPQVNIVKKTEVQTGGFSKESILPKRNSDKLIARKKDWDPKKYGGFDSPTVAYSVLVVAKVEKGKSKKLKSVKELLGITIMERSSFEKNPIDFLEAKGYKEVKKDLIIKLPKYSLFELENGRKRMLASAGELQKGNELALPSKYVNFLYLASHYEKLKGSPEDNEQKQLFVEQHKHYLDEIIEQISEFSKRVILADANLDKVLSAYNKHRDKPIREQAENIIHLFTLTNLGAPAAFKYFDTTIDRKRYTSTKEVLDATLIHQSITGLYETRIDLSQLGGDGGGSSPAPEAAAKGGMDPLQLLQPLEAEIKGTKLKAHWNSGATITCVPEAFLEDERPIQTMLIKTIHGEKQQDVYYLTFKVQGRKVEAEVLASPYDYILLNPSDVPWLMKKPLQLTVLVPLHEYQERLLQQTALPKEQKELLQKLFLKYDALWQHWENQVGHRRIKPHNIATGTLAPRPQKQYPINPKAKPSIQIVIDDLLKQGVLIQQNSTMNTPVYPVPKPDGKWRMVLDYREVNKTIPLIAAQNQHSAGILSSIYRGKYKTTLDLTNGFWAHPITPESYWLTAFTWQGKQYCWTRLPQGFLNSPALFTADVVDLLKEIPNVQAYVDDIYISHDDPQEHLEQLEKIFSILLNAGYVVSLKKSEIAQREVEFLGFNITKEGRGLTDTFKQKLLNITPPKDLKQLQSILGLLNFARNFIPNYSELVKPLYTIVANANGKFISWTEDNSNQLQHIISVLNQADNLEERNPETRLIIKVNSSPSAGYIRYYNEGSKRPIMYVNYIFSKAEAKFTQTEKLLTTMHKGLIKAMDLAMGQEILVYSPIVSMTKIQRTPLPERKALPVRWITWMTYLEDPRIQFHYDKSLPELQQIPNVTEDVIAKTKHPSEFAMVFYTDGSAIKHPDVNKSHSAGMGIAQVQFIPEYKIVHQWSIPLGDHTAQLAEIAAVEFACKKALKISGPVLIVTDSFYVAESANKELPYWKSNGFLNNKKKPLRHVSKWKSIAECLQLKPDIIIMHEKGHQQPMTTLHTEGNNLADKLATQGSYVVHAGKRTADGSEFEKRTADGSEFESPKKKAKVE

SEQ ID NO: 7599 - protein, 2087 aa, synthetic construct
MPAAKRVKLDGGDKKYSIGLDIGTNSVGWAVITDEYKVPSKKFKVLGNTDRHSIKKNLIGALLFDSGETAEATRLKRTARRRYTRRKNRICYLQEIFSNEMAKVDDSFFHRLEESFLVEEDKKHERHPIFGNIVDEVAYHEKYPTIYHLRKKLVDSTDKADLRLIYLALAHMIKFRGHFLIEGDLNPDNSDVDKLFIQLVQTYNQLFEENPINASGVDAKAILSARLSKSRRLENLIAQLPGEKKNGLFGNLIALSLGLTPNFKSNFDLAEDAKLQLSKDTYDDDLDNLLAQIGDQYADLFLAAKNLSDAILLSDILRVNTEITKAPLSASMIKRYDEHHQDLTLLKALVRQQLPEKYKEIFFDQSKNGYAGYIDGGASQEEFYKFIKPILEKMDGTEELLVKLNREDLLRKQRTFDNGSIPHQIHLGELHAILRRQEDFYPFLKDNREKIEKILTFRIPYYVGPLARGNSRFAWMTRKSEETITPWNFEEVVDKGASAQSFIERMTNFDKNLPNEKVLPKHSLLYEYFTVYNELTKVKYVTEGMRKPAFLSGEQKKAIVDLLFKTNRKVTVKQLKEDYFKKIECFDSVEISGVEDRFNASLGTYHDLLKIIKDKDFLDNEENEDILEDIVLTLTLFEDREMIEERLKTYAHLFDDKVMKQLKRRRYTGWGRLSRKLINGIRDKQSGKTILDFLKSDGFANRNFMQLIHDDSLTFKEDIQKAQVSGQGDSLHEHIANLAGSPAIKKGILQTVKVVDELVKVMGRHKPENIVIEMARENQTTQKGQKNSRERMKRIEEGIKELGSQILKEHPVENTQLQNEKLYLYYLQNGRDMYVDQELDINRLSDYDVDHIVPQSFLKDDSIDNKVLTRSDKARGKSDNVPSEEVVKKMKNYWRQLLNAKLITQRKFDNLTKAERGGLSELDKAGFIKRQLVETRQITKHVAQILDSRMNTKYDENDKLIREVKVITLKSKLVSDFRKDFQFYKVREINNYHHAHDAYLNAVVGTALIKKYPKLESEFVYGDYKVYDVRKMIAKSEQEIGKATAKYFFYSNIMNFFKTEITLANGEIRKRPLIETNGETGEIVWDKGRDFATVRKVLSMPQVNIVKKTEVQTGGFSKESILPKRNSDKLIARKKDWDPKKYGGFDSPTVAYSVLVVAKVEKGKSKKLKSVKELLGITIMERSSFEKNPIDFLEAKGYKEVKKDLIIKLPKYSLFELENGRKRMLASAGELQKGNELALPSKYVNFLYLASHYEKLKGSPEDNEQKQLFVEQHKHYLDEIIEQISEFSKRVILADANLDKVLSAYNKHRDKPIREQAENIIHLFTLTNLGAPAAFKYFDTTIDRKRYTSTKEVLDATLIHQSITGLYETRIDLSQLGGDGGGSSPAPEAAAKGGIPWLMKKPLQLTTLVPLQEYEERLLKQTMLTGSYKEKLQSLFLKYDALWQHWENQVGHRRIKPHHIATGTVNPRPQKQYPINPKAKASIQTVINDLLKQGVLIQQNSIMNTPVYPVPKPDGKWRMVLDYREVNKTIPLIAAQNQHSAGILSSIFRGKYKTTLDLSNGFWAHSITPESYWLTAFTWLGQQYCWTRLPQGFLNSPALFNADVVDLLKEVPNVQVYVDDIYISHDDPREHLEQLEKVFSLLLNAGYVVSLKKSEIAQHEVEFLGFNITKEGRGLTETFKQKLLNITPPRDLKQLQSILGKLNFARNFIPNFSELVKPLYNIIATAPGKYITWTTDNSQQLQNIISMLNSAENLEERNPEVRLIMKVNTSPSAGYIRFYNEFAKRPIMYLNYVYTKAEVKFTNTEKLLTTIHKGLIKALDLGMGQEILVYSPIVSMTKIQKTPLPERKALPIRWITWMSYLEDPRIQFHYDKTLPELQQVPTVTDDIIAKIKHPSEFSMVFYTDGSAIKHPNVNKSHNAGMGIAQVQFKPEFTVINTWSIPLGDHTAQLAEVAAVEFACKKALKIDGPVLIVTDSFYVAESVNKELPYWQSNGFFNNKKKPLKHVSKWKSIADCIQLKPDIIIIHEKGHQPTASTFHTEGNNLADKLATQGSYVVNAGKRTADGSEFEKRTADGSEFESPKKKAKVE

SEQ ID NO: 7600 - protein, 2096 aa, synthetic construct
MPAAKRVKLDGGDKKYSIGLDIGTNSVGWAVITDEYKVPSKKFKVLGNTDRHSIKKNLIGALLFDSGETAEATRLKRTARRRYTRRKNRICYLQEIFSNEMAKVDDSFFHRLEESFLVEEDKKHERHPIFGNIVDEVAYHEKYPTIYHLRKKLVDSTDKADLRLIYLALAHMIKFRGHFLIEGDLNPDNSDVDKLFIQLVQTYNQLFEENPINASGVDAKAILSARLSKSRRLENLIAQLPGEKKNGLFGNLIALSLGLTPNFKSNFDLAEDAKLQLSKDTYDDDLDNLLAQIGDQYADLFLAAKNLSDAILLSDILRVNTEITKAPLSASMIKRYDEHHQDLTLLKALVRQQLPEKYKEIFFDQSKNGYAGYIDGGASQEEFYKFIKPILEKMDGTEELLVKLNREDLLRKQRTFDNGSIPHQIHLGELHAILRRQEDFYPFLKDNREKIEKILTFRIPYYVGPLARGNSRFAWMTRKSEETITPWNFEEVVDKGASAQSFIERMTNFDKNLPNEKVLPKHSLLYEYFTVYNELTKVKYVTEGMRKPAFLSGEQKKAIVDLLFKTNRKVTVKQLKEDYFKKIECFDSVEISGVEDRFNASLGTYHDLLKIIKDKDFLDNEENEDILEDIVLTLTLFEDREMIEERLKTYAHLFDDKVMKQLKRRRYTGWGRLSRKLINGIRDKQSGKTILDFLKSDGFANRNFMQLIHDDSLTFKEDIQKAQVSGQGDSLHEHIANLAGSPAIKKGILQTVKVVDELVKVMGRHKPENIVIEMARENQTTQKGQKNSRERMKRIEEGIKELGSQILKEHPVENTQLQNEKLYLYYLQNGRDMYVDQELDINRLSDYDVDHIVPQSFLKDDSIDNKVLTRSDKARGKSDNVPSEEVVKKMKNYWRQLLNAKLITQRKFDNLTKAERGGLSELDKAGFIKRQLVETRQITKHVAQILDSRMNTKYDENDKLIREVKVITLKSKLVSDFRKDFQFYKVREINNYHHAHDAYLNAVVGTALIKKYPKLESEFVYGDYKVYDVRKMIAKSEQEIGKATAKYFFYSNIMNFFKTEITLANGEIRKRPLIETNGETGEIVWDKGRDFATVRKVLSMPQVNIVKKTEVQTGGFSKESILPKRNSDKLIARKKDWDPKKYGGFDSPTVAYSVLVVAKVEKGKSKKLKSVKELLGITIMERSSFEKNPIDFLEAKGYKEVKKDLIIKLPKYSLFELENGRKRMLASAGELQKGNELALPSKYVNFLYLASHYEKLKGSPEDNEQKQLFVEQHKHYLDEIIEQISEFSKRVILADANLDKVLSAYNKHRDKPIREQAENIIHLFTLTNLGAPAAFKYFDTTIDRKRYTSTKEVLDATLIHQSITGLYETRIDLSQLGGDGGGSSPAPEAAAKGGTLNIEDEYRLHETSKEPDVPLGSTWLSDFPQAWAETGGMGLAVRQAPLIIPLKATSTPVSIKQYPMSQEARLGIKPHIQRLLDQGILVPCQSPWNTPLLPVKKPGTNDYRPVQDLREVNKRVEDIHPTVPNPYNLLSGLPPSHQWYTVLDLKDAFFCLRLHPTSQPLFAFEWRDPEMGISGQLTWTRLPQGFKNSPTLFNEALHRDLADFRIQHPDLILLQYVDDLLLAATSEQDCQRGTRALLQTLGNLGYRASAKKAQICQKQVKYLGYLLKEGQRWLTEARKETVMGQPTPKTPRQLREFLGTAGFCRLWIPGFAEMAAPLYPLTKPGTLFNWGPDQQKAYQEIKQALLTAPALGLPDLTKPFELFVDEKQGYAKGVLTQKLGPWRRPVAYLSKKLDPVAAGWPPCLRMVAAIAVLTKDAGKLTMGQPLVILAPHAVEALVKQPPDRWLSNARMTHYQAMLLDTDRVQFGPVVALNPATLLPLPEKEAPHDCLEILAETHGTRPDLTDQPIPDADYTWYTDGSSFLQEGQRRAGAAVTTETEVIWARALPAGTSAQRAELIALTQALKMAEGKKLNVYTDSRYAFATAHVHGEIYRRRGWLTSEGREIKNKNEILALLKALFLPKRLSIIHCPGHQKGNSAEARGNRMADQAAREAAMKAVLETSTLLAGKRTADGSEFEKRTADGSEFESPKKKAKVE

SEQ ID NO: 7601 - protein, 2087 aa, synthetic construct
MPAAKRVKLDGGDKKYSIGLDIGTNSVGWAVITDEYKVPSKKFKVLGNTDRHSIKKNLIGALLFDSGETAEATRLKRTARRRYTRRKNRICYLQEIFSNEMAKVDDSFFHRLEESFLVEEDKKHERHPIFGNIVDEVAYHEKYPTIYHLRKKLVDSTDKADLRLIYLALAHMIKFRGHFLIEGDLNPDNSDVDKLFIQLVQTYNQLFEENPINASGVDAKAILSARLSKSRRLENLIAQLPGEKKNGLFGNLIALSLGLTPNFKSNFDLAEDAKLQLSKDTYDDDLDNLLAQIGDQYADLFLAAKNLSDAILLSDILRVNTEITKAPLSASMIKRYDEHHQDLTLLKALVRQQLPEKYKEIFFDQSKNGYAGYIDGGASQEEFYKFIKPILEKMDGTEELLVKLNREDLLRKQRTFDNGSIPHQIHLGELHAILRRQEDFYPFLKDNREKIEKILTFRIPYYVGPLARGNSRFAWMTRKSEETITPWNFEEVVDKGASAQSFIERMTNFDKNLPNEKVLPKHSLLYEYFTVYNELTKVKYVTEGMRKPAFLSGEQKKAIVDLLFKTNRKVTVKQLKEDYFKKIECFDSVEISGVEDRFNASLGTYHDLLKIIKDKDFLDNEENEDILEDIVLTLTLFEDREMIEERLKTYAHLFDDKVMKQLKRRRYTGWGRLSRKLINGIRDKQSGKTILDFLKSDGFANRNFMQLIHDDSLTFKEDIQKAQVSGQGDSLHEHIANLAGSPAIKKGILQTVKVVDELVKVMGRHKPENIVIEMARENQTTQKGQKNSRERMKRIEEGIKELGSQILKEHPVENTQLQNEKLYLYYLQNGRDMYVDQELDINRLSDYDVDHIVPQSFLKDDSIDNKVLTRSDKARGKSDNVPSEEVVKKMKNYWRQLLNAKLITQRKFDNLTKAERGGLSELDKAGFIKRQLVETRQITKHVAQILDSRMNTKYDENDKLIREVKVITLKSKLVSDFRKDFQFYKVREINNYHHAHDAYLNAVVGTALIKKYPKLESEFVYGDYKVYDVRKMIAKSEQEIGKATAKYFFYSNIMNFFKTEITLANGEIRKRPLIETNGETGEIVWDKGRDFATVRKVLSMPQVNIVKKTEVQTGGFSKESILPKRNSDKLIARKKDWDPKKYGGFDSPTVAYSVLVVAKVEKGKSKKLKSVKELLGITIMERSSFEKNPIDFLEAKGYKEVKKDLIIKLPKYSLFELENGRKRMLASAGELQKGNELALPSKYVNFLYLASHYEKLKGSPEDNEQKQLFVEQHKHYLDEIIEQISEFSKRVILADANLDKVLSAYNKHRDKPIREQAENIIHLFTLTNLGAPAAFKYFDTTIDRKRYTSTKEVLDATLIHQSITGLYETRIDLSQLGGDGGEAAAKGSSPAPGGVPWILKKPLELTIKLDLEEQQGTLLNNSILSKKGKEELKQLFEKYSALWQSWENQVGHRRIRPHKIATGTVKPTPQKQYHINPKAKPDIQIVINDLLKQGVLIQKESTMNTPVYPVPKPNGRWRMVLDYRAVNKVTPLIAVQNQHSYGILGSLFKGRYKTTIDLSNGFWAHPIVPEDYWITAFTWQGKQYCWTVLPQGFLNSPGLFTGDVVDLLQGIPNVEVYVDDVYISHDSEKEHLEYLDILFNRLKEAGYIISLKKSNIANSIVDFLGFQITNEGRGLTDTFKEKLENITAPTTLKQLQSILGLLNFARNFIPDFTELIAPLYALIPKSTKNYVPWQIEHSTTLETLITKLNGAEYLQGRKGDKTLIMKVNASYTTGYIRYYNEGEKKPISYVSIVFSKTELKFTELEKLLTTVHKGLLKALDLSMGQNIHVYSPIVSMQNIQKTPQTAKKALASRWLSWLSYLEDPRIRFFYDPQMPALKDLPAVDTGKDNKKHPSNFQHIFYTDGSAITSPTKEGHLNAGMGIVYFINKDGNLQKQQEWSISLGNHTAQFAEIAAFEFALKKCLPLGGNILVVTDSNYVAKAYNEELDVWASNGFVNNRKKPLKHISKWKSVADLKRLRPDVVVTHEPGHQKLDSSPHAYGNNLADQLATQASFKVHAGKRTADGSEFEKRTADGSEFESPKKKAKVE

SEQ ID NO: 7602 - protein, 2087 aa, synthetic construct
MPAAKRVKLDGGDKKYSIGLDIGTNSVGWAVITDEYKVPSKKFKVLGNTDRHSIKKNLIGALLFDSGETAEATRLKRTARRRYTRRKNRICYLQEIFSNEMAKVDDSFFHRLEESFLVEEDKKHERHPIFGNIVDEVAYHEKYPTIYHLRKKLVDSTDKADLRLIYLALAHMIKFRGHFLIEGDLNPDNSDVDKLFIQLVQTYNQLFEENPINASGVDAKAILSARLSKSRRLENLIAQLPGEKKNGLFGNLIALSLGLTPNFKSNFDLAEDAKLQLSKDTYDDDLDNLLAQIGDQYADLFLAAKNLSDAILLSDILRVNTEITKAPLSASMIKRYDEHHQDLTLLKALVRQQLPEKYKEIFFDQSKNGYAGYIDGGASQEEFYKFIKPILEKMDGTEELLVKLNREDLLRKQRTFDNGSIPHQIHLGELHAILRRQEDFYPFLKDNREKIEKILTFRIPYYVGPLARGNSRFAWMTRKSEETITPWNFEEVVDKGASAQSFIERMTNFDKNLPNEKVLPKHSLLYEYFTVYNELTKVKYVTEGMRKPAFLSGEQKKAIVDLLFKTNRKVTVKQLKEDYFKKIECFDSVEISGVEDRFNASLGTYHDLLKIIKDKDFLDNEENEDILEDIVLTLTLFEDREMIEERLKTYAHLFDDKVMKQLKRRRYTGWGRLSRKLINGIRDKQSGKTILDFLKSDGFANRNFMQLIHDDSLTFKEDIQKAQVSGQGDSLHEHIANLAGSPAIKKGILQTVKVVDELVKVMGRHKPENIVIEMARENQTTQKGQKNSRERMKRIEEGIKELGSQILKEHPVENTQLQNEKLYLYYLQNGRDMYVDQELDINRLSDYDVDHIVPQSFLKDDSIDNKVLTRSDKARGKSDNVPSEEVVKKMKNYWRQLLNAKLITQRKFDNLTKAERGGLSELDKAGFIKRQLVETRQITKHVAQILDSRMNTKYDENDKLIREVKVITLKSKLVSDFRKDFQFYKVREINNYHHAHDAYLNAVVGTALIKKYPKLESEFVYGDYKVYDVRKMIAKSEQEIGKATAKYFFYSNIMNFFKTEITLANGEIRKRPLIETNGETGEIVWDKGRDFATVRKVLSMPQVNIVKKTEVQTGGFSKESILPKRNSDKLIARKKDWDPKKYGGFDSPTVAYSVLVVAKVEKGKSKKLKSVKELLGITIMERSSFEKNPIDFLEAKGYKEVKKDLIIKLPKYSLFELENGRKRMLASAGELQKGNELALPSKYVNFLYLASHYEKLKGSPEDNEQKQLFVEQHKHYLDEIIEQISEFSKRVILADANLDKVLSAYNKHRDKPIREQAENIIHLFTLTNLGAPAAFKYFDTTIDRKRYTSTKEVLDATLIHQSITGLYETRIDLSQLGGDGGEAAAKGSSPAPGGVPWLTQQPLQLTILVPLQEYQEKILSKTALPEDQKQQLKTLFVKYDNLWQHWENQVGHRKIRPHNIATGDYPPRPQKQYPINPKAKPSIQIVIDDLLKQGVLTPQNSTMNTPVYPVPKPDGRWRMVLDYREVNKTIPLTAAQNQHSAGILATIVRQKYKTTLDLANGFWAHPITPESYWLTAFTWQGKQYCWTRLPQGFLNSPALFNADVVDLLKEIPNVQVYVDDIYLSHDDPKEHVQQLEKVFQILLQAGYVVSLKKSEIGQKTVEFLGFNITKEGRGLTDTFKTKLLNITPPKDLKQLQSILGKLNFARNFIPNFAELVQPLYNLIAPAKGKYIEWSEENTKQLNMVIEALNTASNLEERLPEQRLVIKVNTSPSAGYVRYYNETGKKPIMYLNYVFSKAELKFSMLEKLLTTMHKALIKAMDLAMGQEILVYSPIVSMTKIQKTPLPERKALPIRWITWMTYLEDPRIQFHYDKTLPELKHIPDVYTSSQSPVKHPSQYEGVFYTDGSAIKSPDPTKSNNAGMGIVHATYKPEYQVLNQWSIPLGNHTAQMAEIAAVEFACKKALKIPGPVLVITDSFYVAESANKELPYWKSNGFVNNKKKPLKHISKWKSIAECLSMKPDITIQHEKGISLQIPVFILKGNALADKLATQGSYVVNAGKRTADGSEFEKRTADGSEFESPKKKAKVE

SEQ ID NO: 7603 - protein, 2218 aa, synthetic construct
MPAAKRVKLDGGDKKYSIGLDIGTNSVGWAVITDEYKVPSKKFKVLGNTDRHSIKKNLIGALLFDSGETAEATRLKRTARRRYTRRKNRICYLQEIFSNEMAKVDDSFFHRLEESFLVEEDKKHERHPIFGNIVDEVAYHEKYPTIYHLRKKLVDSTDKADLRLIYLALAHMIKFRGHFLIEGDLNPDNSDVDKLFIQLVQTYNQLFEENPINASGVDAKAILSARLSKSRRLENLIAQLPGEKKNGLFGNLIALSLGLTPNFKSNFDLAEDAKLQLSKDTYDDDLDNLLAQIGDQYADLFLAAKNLSDAILLSDILRVNTEITKAPLSASMIKRYDEHHQDLTLLKALVRQQLPEKYKEIFFDQSKNGYAGYIDGGASQEEFYKFIKPILEKMDGTEELLVKLNREDLLRKQRTFDNGSIPHQIHLGELHAILRRQEDFYPFLKDNREKIEKILTFRIPYYVGPLARGNSRFAWMTRKSEETITPWNFEEVVDKGASAQSFIERMTNFDKNLPNEKVLPKHSLLYEYFTVYNELTKVKYVTEGMRKPAFLSGEQKKAIVDLLFKTNRKVTVKQLKEDYFKKIECFDSVEISGVEDRFNASLGTYHDLLKIIKDKDFLDNEENEDILEDIVLTLTLFEDREMIEERLKTYAHLFDDKVMKQLKRRRYTGWGRLSRKLINGIRDKQSGKTILDFLKSDGFANRNFMQLIHDDSLTFKEDIQKAQVSGQGDSLHEHIANLAGSPAIKKGILQTVKVVDELVKVMGRHKPENIVIEMARENQTTQKGQKNSRERMKRIEEGIKELGSQILKEHPVENTQLQNEKLYLYYLQNGRDMYVDQELDINRLSDYDVDHIVPQSFLKDDSIDNKVLTRSDKARGKSDNVPSEEVVKKMKNYWRQLLNAKLITQRKFDNLTKAERGGLSELDKAGFIKRQLVETRQITKHVAQILDSRMNTKYDENDKLIREVKVITLKSKLVSDFRKDFQFYKVREINNYHHAHDAYLNAVVGTALIKKYPKLESEFVYGDYKVYDVRKMIAKSEQEIGKATAKYFFYSNIMNFFKTEITLANGEIRKRPLIETNGETGEIVWDKGRDFATVRKVLSMPQVNIVKKTEVQTGGFSKESILPKRNSDKLIARKKDWDPKKYGGFDSPTVAYSVLVVAKVEKGKSKKLKSVKELLGITIMERSSFEKNPIDFLEAKGYKEVKKDLIIKLPKYSLFELENGRKRMLASAGELQKGNELALPSKYVNFLYLASHYEKLKGSPEDNEQKQLFVEQHKHYLDEIIEQISEFSKRVILADANLDKVLSAYNKHRDKPIREQAENIIHLFTLTNLGAPAAFKYFDTTIDRKRYTSTKEVLDATLIHQSITGLYETRIDLSQLGGDGGEAAAKGSSPAPGGTLGDQGSRGSDPLPEPRVTLTVEGIPTEFLVNTGAEHSVLTKPMGKMGSKRTVVAGATGSKVYPWTTKRLLKIGQKQVTHSFLVIPECPAPLLGRDLLTKLKAQIQFSTEGPQVTWEDRPAMCLVLNLEEEYRLHEKPVPPSIDPSWLQLFPMVWAEKAGMGLANQVPPVVVELKSDASPVAVRQYPMSKEAREGIRPHIQRFLDLGILVPCQSPWNTPLLPVKKPGTNDYRPVQDLREVNKRVQDIHPTVPNPYNLLSSLPPSHTWYSVLDLKDAFFCLKLHPNSQPLFAFEWRDPEKGNTGQLTWTRLPQGFKNSPTLFNEALHRDLASFRALNPQVVMLQYVDDLLVAAPTYRDCKEGTRRLLQELSKLGYRVSAKKAQLCREEVTYLGYLLKGGKRWLTPARKATVMKIPTPTTPRQVREFLGTAGFCRLWIPGFASLAAPLYPLTRPKVPFTWTEAHQEAFGRIKEALLSAPALALPDLTKPFALYVDEKEGVARGVLTQTLGPWRRPVAYLSKKLDPVASGWPTCLKAIAAVALLLKDADKLTLGQNVLVIAPHNLESIVRQPPDRWMTNARMTHYQSLLLNERVSFAPPAILNPATLLPVESDDTPIHICSEILAEETGTRPDLRDQPLPGVPAWYTDGSSFIMDGRRQAGAAIVDNKRTVWASNLPEGTSAQKAELIALTQALRLAEGKSINIYTDSRYAFATAHVHGAIYKQRGWLTSAGKDIKNKEEILALLEAIHLPKRVAIIHCPGHQRGTDPVATGNRKADEAAKQAAQSTRILTETTKNAGKRTADGSEFEKRTADGSEFESPKKKAKVE

SEQ ID NO: 7604 - protein, 2096 aa, synthetic construct
MPAAKRVKLDGGDKKYSIGLDIGTNSVGWAVITDEYKVPSKKFKVLGNTDRHSIKKNLIGALLFDSGETAEATRLKRTARRRYTRRKNRICYLQEIFSNEMAKVDDSFFHRLEESFLVEEDKKHERHPIFGNIVDEVAYHEKYPTIYHLRKKLVDSTDKADLRLIYLALAHMIKFRGHFLIEGDLNPDNSDVDKLFIQLVQTYNQLFEENPINASGVDAKAILSARLSKSRRLENLIAQLPGEKKNGLFGNLIALSLGLTPNFKSNFDLAEDAKLQLSKDTYDDDLDNLLAQIGDQYADLFLAAKNLSDAILLSDILRVNTEITKAPLSASMIKRYDEHHQDLTLLKALVRQQLPEKYKEIFFDQSKNGYAGYIDGGASQEEFYKFIKPILEKMDGTEELLVKLNREDLLRKQRTFDNGSIPHQIHLGELHAILRRQEDFYPFLKDNREKIEKILTFRIPYYVGPLARGNSRFAWMTRKSEETITPWNFEEVVDKGASAQSFIERMTNFDKNLPNEKVLPKHSLLYEYFTVYNELTKVKYVTEGMRKPAFLSGEQKKAIVDLLFKTNRKVTVKQLKEDYFKKIECFDSVEISGVEDRFNASLGTYHDLLKIIKDKDFLDNEENEDILEDIVLTLTLFEDREMIEERLKTYAHLFDDKVMKQLKRRRYTGWGRLSRKLINGIRDKQSGKTILDFLKSDGFANRNFMQLIHDDSLTFKEDIQKAQVSGQGDSLHEHIANLAGSPAIKKGILQTVKVVDELVKVMGRHKPENIVIEMARENQTTQKGQKNSRERMKRIEEGIKELGSQILKEHPVENTQLQNEKLYLYYLQNGRDMYVDQELDINRLSDYDVDHIVPQSFLKDDSIDNKVLTRSDKARGKSDNVPSEEVVKKMKNYWRQLLNAKLITQRKFDNLTKAERGGLSELDKAGFIKRQLVETRQITKHVAQILDSRMNTKYDENDKLIREVKVITLKSKLVSDFRKDFQFYKVREINNYHHAHDAYLNAVVGTALIKKYPKLESEFVYGDYKVYDVRKMIAKSEQEIGKATAKYFFYSNIMNFFKTEITLANGEIRKRPLIETNGETGEIVWDKGRDFATVRKVLSMPQVNIVKKTEVQTGGFSKESILPKRNSDKLIARKKDWDPKKYGGFDSPTVAYSVLVVAKVEKGKSKKLKSVKELLGITIMERSSFEKNPIDFLEAKGYKEVKKDLIIKLPKYSLFELENGRKRMLASAGELQKGNELALPSKYVNFLYLASHYEKLKGSPEDNEQKQLFVEQHKHYLDEIIEQISEFSKRVILADANLDKVLSAYNKHRDKPIREQAENIIHLFTLTNLGAPAAFKYFDTTIDRKRYTSTKEVLDATLIHQSITGLYETRIDLSQLGGDGGEAAAKGSSPAPGGTLNLEDEYRLYETSAEPEVSPGSTWLSDFPQAWAETGGMGLAVRQAPLIIPLKATSTPVSIKQYPMSQEAKLGIKPHIQRLLDQGILVPCQSPWNTPLLPVKKPGTNDYRPVQDLREVNKRVEDIHPTVPNPYNLLSGLPPSHRWYTVLDLKDAFFCLRLHPTSQPLFAFEWRDPGMGISGQLTWTRLPQGFKNSPTLFNEALHRDLADFRIQHPDLILLQYVDDILLAATSELDCQQGTRALLLTLGNLGYRASAKKAQLCQKQVKYLGYLLKEGQRWLTEARKETVMGQPTPKTPRQLREFLGTAGFCRLWIPGFAEMAAPLYPLTKPGTLFNWGPDQQKAYQEIKQALLTAPALGLPDLTKPFELFVDEKQGYAKGVLTQKLGPWRRPVAYLSKKLDPVAAGWPPCLRMVAAIAVLRKDAGKLTMGQPLVILAPHAVEALVKQPPDRWLSNARMTHYQAMLLDTDRVQFGPVVALNPATLLPLPEEGAPHDCLEILAETHGTRPDLTDQPIPDADHTWYTDGSSFLQEGQRKAGAAVTTETEVIWARALPAGTSAQRAELIALTQALKMAEGKRLNVYTDSRYAFATAHIHGEIYRRRGWLTSEGREIKNKSEILALLKALFLPKRLSIIHCLGHQKGDSAEARGNRLADQAAREAAIKTPPDTSTLLAGKRTADGSEFEKRTADGSEFESPKKKAKVE

SEQ ID NO: 7605 - protein, 2096 aa, synthetic construct
MPAAKRVKLDGGDKKYSIGLDIGTNSVGWAVITDEYKVPSKKFKVLGNTDRHSIKKNLIGALLFDSGETAEATRLKRTARRRYTRRKNRICYLQEIFSNEMAKVDDSFFHRLEESFLVEEDKKHERHPIFGNIVDEVAYHEKYPTIYHLRKKLVDSTDKADLRLIYLALAHMIKFRGHFLIEGDLNPDNSDVDKLFIQLVQTYNQLFEENPINASGVDAKAILSARLSKSRRLENLIAQLPGEKKNGLFGNLIALSLGLTPNFKSNFDLAEDAKLQLSKDTYDDDLDNLLAQIGDQYADLFLAAKNLSDAILLSDILRVNTEITKAPLSASMIKRYDEHHQDLTLLKALVRQQLPEKYKEIFFDQSKNGYAGYIDGGASQEEFYKFIKPILEKMDGTEELLVKLNREDLLRKQRTFDNGSIPHQIHLGELHAILRRQEDFYPFLKDNREKIEKILTFRIPYYVGPLARGNSRFAWMTRKSEETITPWNFEEVVDKGASAQSFIERMTNFDKNLPNEKVLPKHSLLYEYFTVYNELTKVKYVTEGMRKPAFLSGEQKKAIVDLLFKTNRKVTVKQLKEDYFKKIECFDSVEISGVEDRFNASLGTYHDLLKIIKDKDFLDNEENEDILEDIVLTLTLFEDREMIEERLKTYAHLFDDKVMKQLKRRRYTGWGRLSRKLINGIRDKQSGKTILDFLKSDGFANRNFMQLIHDDSLTFKEDIQKAQVSGQGDSLHEHIANLAGSPAIKKGILQTVKVVDELVKVMGRHKPENIVIEMARENQTTQKGQKNSRERMKRIEEGIKELGSQILKEHPVENTQLQNEKLYLYYLQNGRDMYVDQELDINRLSDYDVDHIVPQSFLKDDSIDNKVLTRSDKARGKSDNVPSEEVVKKMKNYWRQLLNAKLITQRKFDNLTKAERGGLSELDKAGFIKRQLVETRQITKHVAQILDSRMNTKYDENDKLIREVKVITLKSKLVSDFRKDFQFYKVREINNYHHAHDAYLNAVVGTALIKKYPKLESEFVYGDYKVYDVRKMIAKSEQEIGKATAKYFFYSNIMNFFKTEITLANGEIRKRPLIETNGETGEIVWDKGRDFATVRKVLSMPQVNIVKKTEVQTGGFSKESILPKRNSDKLIARKKDWDPKKYGGFDSPTVAYSVLVVAKVEKGKSKKLKSVKELLGITIMERSSFEKNPIDFLEAKGYKEVKKDLIIKLPKYSLFELENGRKRMLASAGELQKGNELALPSKYVNFLYLASHYEKLKGSPEDNEQKQLFVEQHKHYLDEIIEQISEFSKRVILADANLDKVLSAYNKHRDKPIREQAENIIHLFTLTNLGAPAAFKYFDTTIDRKRYTSTKEVLDATLIHQSITGLYETRIDLSQLGGDGGEAAAKGSSPAPGGTLNIEDEYRLHETSKEPDVSLGSTWLSDFPQAWAETGGMGLAVRQAPLIIPLKATSTPVSIKQYPMSQEARLGIKPHIQRLLDQGILVPCQSPWNTPLLPVKKPGTNDYRPVQDLREVNKRVEDIHPTVPNPYNLLSGLPPSHQWYTVLDLKDAFFCLRLHPTSQPLFAFEWRDPEMGISGQLTWTRLPQGFKNSPTLFDEALHRDLAGFRIQHPDLILLQYVDDLLLAATSELDCQQGTRALLQTLGDLGYRASAKKAQICQKQVKYLGYLLKEGQRWLTEARKETVMGQPIPKTPRQLREFLGTAGFCRLWIPGFAEMAAPLYPLTKTGTLFNWGPDQQKAFQEIKQALLTAPALGLPDLTKPFELFVDEKQGYAKGVLTQKLGPWRRPVAYLSKKLDPVAAGWPPCLRMVAAIAVLTKDAGKLTMGQPLVILAPHAVEALVKQPPDRWLSNARMTHYQALLLDTDRVQFGPVVALNPATLLPLPEEGLQHDCLDILAEAHGTRSDLMDQPLPDADHTWYTDGSSFLQEGQRKAGAAVTTETEVIWARALPAGTSAQRAELIALTQALKMAEGKKLNVYTDSRYAFATAHIHGEIYRRRGLLTSEGKEIKNKDEILALLKALFLPKRLSIIHCPGHQKGNSAEARGNRMADQAAREVATRETPETSTLLAGKRTADGSEFEKRTADGSEFESPKKKAKVE

SEQ ID NO: 7606 - protein, 2096 aa, synthetic construct
MPAAKRVKLDGGDKKYSIGLDIGTNSVGWAVITDEYKVPSKKFKVLGNTDRHSIKKNLIGALLFDSGETAEATRLKRTARRRYTRRKNRICYLQEIFSNEMAKVDDSFFHRLEESFLVEEDKKHERHPIFGNIVDEVAYHEKYPTIYHLRKKLVDSTDKADLRLIYLALAHMIKFRGHFLIEGDLNPDNSDVDKLFIQLVQTYNQLFEENPINASGVDAKAILSARLSKSRRLENLIAQLPGEKKNGLFGNLIALSLGLTPNFKSNFDLAEDAKLQLSKDTYDDDLDNLLAQIGDQYADLFLAAKNLSDAILLSDILRVNTEITKAPLSASMIKRYDEHHQDLTLLKALVRQQLPEKYKEIFFDQSKNGYAGYIDGGASQEEFYKFIKPILEKMDGTEELLVKLNREDLLRKQRTFDNGSIPHQIHLGELHAILRRQEDFYPFLKDNREKIEKILTFRIPYYVGPLARGNSRFAWMTRKSEETITPWNFEEVVDKGASAQSFIERMTNFDKNLPNEKVLPKHSLLYEYFTVYNELTKVKYVTEGMRKPAFLSGEQKKAIVDLLFKTNRKVTVKQLKEDYFKKIECFDSVEISGVEDRFNASLGTYHDLLKIIKDKDFLDNEENEDILEDIVLTLTLFEDREMIEERLKTYAHLFDDKVMKQLKRRRYTGWGRLSRKLINGIRDKQSGKTILDFLKSDGFANRNFMQLIHDDSLTFKEDIQKAQVSGQGDSLHEHIANLAGSPAIKKGILQTVKVVDELVKVMGRHKPENIVIEMARENQTTQKGQKNSRERMKRIEEGIKELGSQILKEHPVENTQLQNEKLYLYYLQNGRDMYVDQELDINRLSDYDVDHIVPQSFLKDDSIDNKVLTRSDKARGKSDNVPSEEVVKKMKNYWRQLLNAKLITQRKFDNLTKAERGGLSELDKAGFIKRQLVETRQITKHVAQILDSRMNTKYDENDKLIREVKVITLKSKLVSDFRKDFQFYKVREINNYHHAHDAYLNAVVGTALIKKYPKLESEFVYGDYKVYDVRKMIAKSEQEIGKATAKYFFYSNIMNFFKTEITLANGEIRKRPLIETNGETGEIVWDKGRDFATVRKVLSMPQVNIVKKTEVQTGGFSKESILPKRNSDKLIARKKDWDPKKYGGFDSPTVAYSVLVVAKVEKGKSKKLKSVKELLGITIMERSSFEKNPIDFLEAKGYKEVKKDLIIKLPKYSLFELENGRKRMLASAGELQKGNELALPSKYVNFLYLASHYEKLKGSPEDNEQKQLFVEQHKHYLDEIIEQISEFSKRVILADANLDKVLSAYNKHRDKPIREQAENIIHLFTLTNLGAPAAFKYFDTTIDRKRYTSTKEVLDATLIHQSITGLYETRIDLSQLGGDGGEAAAKGSSPAPGGTLNIEDEYRLHETSKEPDVSLGSTWLSDFPQAWAETGGMGLAVRQAPLIIPLKATSTPVSIKQYPMSQEARLGIKPHIQRLLDQGILVPCQSPWNTPLLPVKKPGTNDYRPVQDLREVNKRVEDIHPTVPNPYNLLSGLPPSHQWYTVLDLKDAFFCLRLHPTSQPLFAFEWRDPEMGISGQLTWTRLPQGFKNSPTLFNEALHRDLAGFRIQHPDLILLQYVDDLLLAATSELDCQQGTRALLQTLGDLGYRASAKKAQICQKQVKYLGYLLKEGQRWLTEARKETVMGQPIPKTPRQLREFLGKAGFCRLFIPGFAEMAAPLYPLTKPGTLFNWGPDQQKAFQEIKQALLTAPALGLPDLTKPFELFVDEKQGYAKGVLTQKLGPWRRPVAYLSKKLDPVAAGWPPCLRMVAAIAVLTKDAGKLTMGQPLVILAPHAVEALVKQPPDRWLSNARMTHYQALLLDTDRVQFGPVVALNPATLLPLPEEGLQHDCLDILAEAHGTRSDLMDQPLPDADHTWYTDGSSFLQEGQRKAGAAVTTETEVIWARALPAGTSAQRAELIALTQALKMAEGKKLNVYTDSRYAFATAHIHGEIYRRRGWLTSEGKEIKNKDEILALLKALFLPKRLSIIHCPGHQKGNSAEARGNRMADQAAREVATRETPETSTLLAGKRTADGSEFEKRTADGSEFESPKKKAKVE

SEQ ID NO: 7607 - protein, 2096 aa, synthetic construct
MPAAKRVKLDGGDKKYSIGLDIGTNSVGWAVITDEYKVPSKKFKVLGNTDRHSIKKNLIGALLFDSGETAEATRLKRTARRRYTRRKNRICYLQEIFSNEMAKVDDSFFHRLEESFLVEEDKKHERHPIFGNIVDEVAYHEKYPTIYHLRKKLVDSTDKADLRLIYLALAHMIKFRGHFLIEGDLNPDNSDVDKLFIQLVQTYNQLFEENPINASGVDAKAILSARLSKSRRLENLIAQLPGEKKNGLFGNLIALSLGLTPNFKSNFDLAEDAKLQLSKDTYDDDLDNLLAQIGDQYADLFLAAKNLSDAILLSDILRVNTEITKAPLSASMIKRYDEHHQDLTLLKALVRQQLPEKYKEIFFDQSKNGYAGYIDGGASQEEFYKFIKPILEKMDGTEELLVKLNREDLLRKQRTFDNGSIPHQIHLGELHAILRRQEDFYPFLKDNREKIEKILTFRIPYYVGPLARGNSRFAWMTRKSEETITPWNFEEVVDKGASAQSFIERMTNFDKNLPNEKVLPKHSLLYEYFTVYNELTKVKYVTEGMRKPAFLSGEQKKAIVDLLFKTNRKVTVKQLKEDYFKKIECFDSVEISGVEDRFNASLGTYHDLLKIIKDKDFLDNEENEDILEDIVLTLTLFEDREMIEERLKTYAHLFDDKVMKQLKRRRYTGWGRLSRKLINGIRDKQSGKTILDFLKSDGFANRNFMQLIHDDSLTFKEDIQKAQVSGQGDSLHEHIANLAGSPAIKKGILQTVKVVDELVKVMGRHKPENIVIEMARENQTTQKGQKNSRERMKRIEEGIKELGSQILKEHPVENTQLQNEKLYLYYLQNGRDMYVDQELDINRLSDYDVDHIVPQSFLKDDSIDNKVLTRSDKARGKSDNVPSEEVVKKMKNYWRQLLNAKLITQRKFDNLTKAERGGLSELDKAGFIKRQLVETRQITKHVAQILDSRMNTKYDENDKLIREVKVITLKSKLVSDFRKDFQFYKVREINNYHHAHDAYLNAVVGTALIKKYPKLESEFVYGDYKVYDVRKMIAKSEQEIGKATAKYFFYSNIMNFFKTEITLANGEIRKRPLIETNGETGEIVWDKGRDFATVRKVLSMPQVNIVKKTEVQTGGFSKESILPKRNSDKLIARKKDWDPKKYGGFDSPTVAYSVLVVAKVEKGKSKKLKSVKELLGITIMERSSFEKNPIDFLEAKGYKEVKKDLIIKLPKYSLFELENGRKRMLASAGELQKGNELALPSKYVNFLYLASHYEKLKGSPEDNEQKQLFVEQHKHYLDEIIEQISEFSKRVILADANLDKVLSAYNKHRDKPIREQAENIIHLFTLTNLGAPAAFKYFDTTIDRKRYTSTKEVLDATLIHQSITGLYETRIDLSQLGGDGGEAAAKGSSPAPGGTLNIEDEHRLHETSKEPDVSLGSTWLSDFPQAWAETGGMGLAVRQAPLIIPLKATSTPVSIKQYPMSQEARLGIKPHIQRLLDQGILVPCQSPWNTPLLPVKKPGTNDYRPVQDLREVNKRVEDIHPTVPNPYNLLSGLPPSHQWYTVLDLKDAFFCLRLHPTSQPLFAFEWRDPEMGISGQLTWTRLPQGFKNSPTLFDEALHRDLADFRIQHPDLILLQYVDDLLLAATSELDCQQGTRALLQTLGNLGYRASAKKAQICQKQVKYLGYLLKEGQRWLTEARKETVMGQPTPKTPRQLREFLGTAGFCRLWIPGFAEMAAPLYPLTKTGTLFNWGPDQQKAYQEIKQALLTAPALGLPDLTKPFELFVDEKQGYAKGVLTQKLGPWRRPVAYLSKKLDPVAAGWPPCLRMVAAIAVLTKDAGKLTMGQPLVILAPHAVEALVKQPPDRWLSNARMTHYQALLLDTDRVQFGPVVALNPATLLPLPEEGLQHNCLDILAEAHGTRPDLTDQPLPDADHTWYTDGSSLLQEGQRKAGAAVTTETEVIWAKALPAGTSAQRAELIALTQALKMAEGKKLNVYTDSRYAFATAHIHGEIYRRRGLLTSEGKEIKNKDEILALLKALFLPKRLSIIHCPGHQKGHSAEARGNRMADQAARKAAITETPDTSTLLAGKRTADGSEFEKRTADGSEFESPKKKAKVE

SEQ ID NO: 7608 - protein, 2024 aa, synthetic construct
MPAAKRVKLDGGDKKYSIGLDIGTNSVGWAVITDEYKVPSKKFKVLGNTDRHSIKKNLIGALLFDSGETAEATRLKRTARRRYTRRKNRICYLQEIFSNEMAKVDDSFFHRLEESFLVEEDKKHERHPIFGNIVDEVAYHEKYPTIYHLRKKLVDSTDKADLRLIYLALAHMIKFRGHFLIEGDLNPDNSDVDKLFIQLVQTYNQLFEENPINASGVDAKAILSARLSKSRRLENLIAQLPGEKKNGLFGNLIALSLGLTPNFKSNFDLAEDAKLQLSKDTYDDDLDNLLAQIGDQYADLFLAAKNLSDAILLSDILRVNTEITKAPLSASMIKRYDEHHQDLTLLKALVRQQLPEKYKEIFFDQSKNGYAGYIDGGASQEEFYKFIKPILEKMDGTEELLVKLNREDLLRKQRTFDNGSIPHQIHLGELHAILRRQEDFYPFLKDNREKIEKILTFRIPYYVGPLARGNSRFAWMTRKSEETITPWNFEEVVDKGASAQSFIERMTNFDKNLPNEKVLPKHSLLYEYFTVYNELTKVKYVTEGMRKPAFLSGEQKKAIVDLLFKTNRKVTVKQLKEDYFKKIECFDSVEISGVEDRFNASLGTYHDLLKIIKDKDFLDNEENEDILEDIVLTLTLFEDREMIEERLKTYAHLFDDKVMKQLKRRRYTGWGRLSRKLINGIRDKQSGKTILDFLKSDGFANRNFMQLIHDDSLTFKEDIQKAQVSGQGDSLHEHIANLAGSPAIKKGILQTVKVVDELVKVMGRHKPENIVIEMARENQTTQKGQKNSRERMKRIEEGIKELGSQILKEHPVENTQLQNEKLYLYYLQNGRDMYVDQELDINRLSDYDVDHIVPQSFLKDDSIDNKVLTRSDKARGKSDNVPSEEVVKKMKNYWRQLLNAKLITQRKFDNLTKAERGGLSELDKAGFIKRQLVETRQITKHVAQILDSRMNTKYDENDKLIREVKVITLKSKLVSDFRKDFQFYKVREINNYHHAHDAYLNAVVGTALIKKYPKLESEFVYGDYKVYDVRKMIAKSEQEIGKATAKYFFYSNIMNFFKTEITLANGEIRKRPLIETNGETGEIVWDKGRDFATVRKVLSMPQVNIVKKTEVQTGGFSKESILPKRNSDKLIARKKDWDPKKYGGFDSPTVAYSVLVVAKVEKGKSKKLKSVKELLGITIMERSSFEKNPIDFLEAKGYKEVKKDLIIKLPKYSLFELENGRKRMLASAGELQKGNELALPSKYVNFLYLASHYEKLKGSPEDNEQKQLFVEQHKHYLDEIIEQISEFSKRVILADANLDKVLSAYNKHRDKPIREQAENIIHLFTLTNLGAPAAFKYFDTTIDRKRYTSTKEVLDATLIHQSITGLYETRIDLSQLGGDGGEAAAKGSSPAPGGGRDIMKDIKVRLMTDSPDDSQDLMIGAIESNLFADQISWKSDQPVWLNQWPLKQEKLQALQQLVTEQLQLGHLEESNSPWNTPVFVIKKKSGKWRLLQDLRAVNATMHDMGALQPGLPSPVAPPKGWEIIIIDLQDCFFNIKLHPEDCKRFAFSVPSPNFKRPYQRFQWKVLPQGMKNSPTLCQKFVDKAILTVRDKYQDSYIVHYMDDILLAHPSRSIVDEILTSMIQALNKHGLVVSTEKIQKYDNLKYLGTHIQGDSVSYQKLQIRTDKLRTLNDFQKLLGNINWIRPFLKLTTGELKPLFEILNPDSNPISTRKLTPEACKALQLMNERLSTARVKRLDLSQPWSLCILKTEYTPTACLWQDGVVEWIHLPHISPKVITPYDIFCTQLIIKGRHRSKELFSKDPDYIVVPYTKVQFDLLLQEKEDWPISLLGFLGEVHFHLPKDPLLTFTLQTAIIFPHMTSTTPLEKGIVIFTDGSANGRSVTYIQGREPIIKENTQNTAQQAEIVAVITAFEEVSQPFNLYTDSKYVTGLFPEIETATLSPRTKIYTELKHLQRLIHKRQEKFYIGHIRGHTGLPGPLAQGNAYADSLTRILTAGKRTADGSEFEKRTADGSEFESPKKKAKVE

SEQ ID NO: 7609 - protein, 2176 aa, synthetic construct
MPAAKRVKLDGGDKKYSIGLDIGTNSVGWAVITDEYKVPSKKFKVLGNTDRHSIKKNLIGALLFDSGETAEATRLKRTARRRYTRRKNRICYLQEIFSNEMAKVDDSFFHRLEESFLVEEDKKHERHPIFGNIVDEVAYHEKYPTIYHLRKKLVDSTDKADLRLIYLALAHMIKFRGHFLIEGDLNPDNSDVDKLFIQLVQTYNQLFEENPINASGVDAKAILSARLSKSRRLENLIAQLPGEKKNGLFGNLIALSLGLTPNFKSNFDLAEDAKLQLSKDTYDDDLDNLLAQIGDQYADLFLAAKNLSDAILLSDILRVNTEITKAPLSASMIKRYDEHHQDLTLLKALVRQQLPEKYKEIFFDQSKNGYAGYIDGGASQEEFYKFIKPILEKMDGTEELLVKLNREDLLRKQRTFDNGSIPHQIHLGELHAILRRQEDFYPFLKDNREKIEKILTFRIPYYVGPLARGNSRFAWMTRKSEETITPWNFEEVVDKGASAQSFIERMTNFDKNLPNEKVLPKHSLLYEYFTVYNELTKVKYVTEGMRKPAFLSGEQKKAIVDLLFKTNRKVTVKQLKEDYFKKIECFDSVEISGVEDRFNASLGTYHDLLKIIKDKDFLDNEENEDILEDIVLTLTLFEDREMIEERLKTYAHLFDDKVMKQLKRRRYTGWGRLSRKLINGIRDKQSGKTILDFLKSDGFANRNFMQLIHDDSLTFKEDIQKAQVSGQGDSLHEHIANLAGSPAIKKGILQTVKVVDELVKVMGRHKPENIVIEMARENQTTQKGQKNSRERMKRIEEGIKELGSQILKEHPVENTQLQNEKLYLYYLQNGRDMYVDQELDINRLSDYDVDHIVPQSFLKDDSIDNKVLTRSDKARGKSDNVPSEEVVKKMKNYWRQLLNAKLITQRKFDNLTKAERGGLSELDKAGFIKRQLVETRQITKHVAQILDSRMNTKYDENDKLIREVKVITLKSKLVSDFRKDFQFYKVREINNYHHAHDAYLNAVVGTALIKKYPKLESEFVYGDYKVYDVRKMIAKSEQEIGKATAKYFFYSNIMNFFKTEITLANGEIRKRPLIETNGETGEIVWDKGRDFATVRKVLSMPQVNIVKKTEVQTGGFSKESILPKRNSDKLIARKKDWDPKKYGGFDSPTVAYSVLVVAKVEKGKSKKLKSVKELLGITIMERSSFEKNPIDFLEAKGYKEVKKDLIIKLPKYSLFELENGRKRMLASAGELQKGNELALPSKYVNFLYLASHYEKLKGSPEDNEQKQLFVEQHKHYLDEIIEQISEFSKRVILADANLDKVLSAYNKHRDKPIREQAENIIHLFTLTNLGAPAAFKYFDTTIDRKRYTSTKEVLDATLIHQSITGLYETRIDLSQLGGDGGEAAAKGSSPAPGGMDPLQLLQPLEAEIKGTKLKAHWNSGATITCVPEAFLEDERPIQTMLIKTIHGEKQQDVYYLTFKVQGRKVEAEVLASPYDYILLNPSDVPWLMKKPLQLTVLVPLHEYQERLLQQTALPKEQKELLQKLFLKYDALWQHWENQVGHRRIKPHNIATGTLAPRPQKQYPINPKAKPSIQIVIDDLLKQGVLIQQNSTMNTPVYPVPKPDGKWRMVLDYREVNKTIPLIAAQNQHSAGILSSIYRGKYKTTLDLTNGFWAHPITPESYWLTAFTWQGKQYCWTRLPQGFLNSPALFNADVVDLLKEIPNVQAYVDDIYISHDDPQEHLEQLEKIFSILLNAGYVVSLKKSEIAQREVEFLGFNITKEGRGLTDTFKQKLLNITPPKDLKQLQSILGKLNFARNFIPNYSELVKPLYTIVAPANGKFISWTEDNSNQLQHIISVLNQADNLEERNPETRLIIKVNSSPSAGYIRYYNEGSKRPIMYVNYIFSKAEAKFTQTEKLLTTMHKGLIKAMDLAMGQEILVYSPIVSMTKIQRTPLPERKALPVRWITWMTYLEDPRIQFHYDKSLPELQQIPNVTEDVIAKTKHPSEFAMVFYTDGSAIKHPDVNKSHSAGMGIAQVQFIPEYKIVHQWSIPLGDHTAQLAEIAAVEFACKKALKISGPVLIVTDSFYVAESANKELPYWKSNGFLNNKKKPLRHVSKWKSIAECLQLKPDIIIMHEKGHQQPMTTLHTEGNNLADKLATQGSYVVHAGKRTADGSEFEKRTADGSEFESPKKKAKVE

SEQ ID NO: 7610 - protein, 2087 aa, synthetic construct
MPAAKRVKLDGGDKKYSIGLDIGTNSVGWAVITDEYKVPSKKFKVLGNTDRHSIKKNLIGALLFDSGETAEATRLKRTARRRYTRRKNRICYLQEIFSNEMAKVDDSFFHRLEESFLVEEDKKHERHPIFGNIVDEVAYHEKYPTIYHLRKKLVDSTDKADLRLIYLALAHMIKFRGHFLIEGDLNPDNSDVDKLFIQLVQTYNQLFEENPINASGVDAKAILSARLSKSRRLENLIAQLPGEKKNGLFGNLIALSLGLTPNFKSNFDLAEDAKLQLSKDTYDDDLDNLLAQIGDQYADLFLAAKNLSDAILLSDILRVNTEITKAPLSASMIKRYDEHHQDLTLLKALVRQQLPEKYKEIFFDQSKNGYAGYIDGGASQEEFYKFIKPILEKMDGTEELLVKLNREDLLRKQRTFDNGSIPHQIHLGELHAILRRQEDFYPFLKDNREKIEKILTFRIPYYVGPLARGNSRFAWMTRKSEETITPWNFEEVVDKGASAQSFIERMTNFDKNLPNEKVLPKHSLLYEYFTVYNELTKVKYVTEGMRKPAFLSGEQKKAIVDLLFKTNRKVTVKQLKEDYFKKIECFDSVEISGVEDRFNASLGTYHDLLKIIKDKDFLDNEENEDILEDIVLTLTLFEDREMIEERLKTYAHLFDDKVMKQLKRRRYTGWGRLSRKLINGIRDKQSGKTILDFLKSDGFANRNFMQLIHDDSLTFKEDIQKAQVSGQGDSLHEHIANLAGSPAIKKGILQTVKVVDELVKVMGRHKPENIVIEMARENQTTQKGQKNSRERMKRIEEGIKELGSQILKEHPVENTQLQNEKLYLYYLQNGRDMYVDQELDINRLSDYDVDHIVPQSFLKDDSIDNKVLTRSDKARGKSDNVPSEEVVKKMKNYWRQLLNAKLITQRKFDNLTKAERGGLSELDKAGFIKRQLVETRQITKHVAQILDSRMNTKYDENDKLIREVKVITLKSKLVSDFRKDFQFYKVREINNYHHAHDAYLNAVVGTALIKKYPKLESEFVYGDYKVYDVRKMIAKSEQEIGKATAKYFFYSNIMNFFKTEITLANGEIRKRPLIETNGETGEIVWDKGRDFATVRKVLSMPQVNIVKKTEVQTGGFSKESILPKRNSDKLIARKKDWDPKKYGGFDSPTVAYSVLVVAKVEKGKSKKLKSVKELLGITIMERSSFEKNPIDFLEAKGYKEVKKDLIIKLPKYSLFELENGRKRMLASAGELQKGNELALPSKYVNFLYLASHYEKLKGSPEDNEQKQLFVEQHKHYLDEIIEQISEFSKRVILADANLDKVLSAYNKHRDKPIREQAENIIHLFTLTNLGAPAAFKYFDTTIDRKRYTSTKEVLDATLIHQSITGLYETRIDLSQLGGDGGEAAAKGSSPAPGGIPWLMKKPLQLTTLVPLQEYEERLLKQTMLTGSYKEKLQSLFLKYDALWQHWENQVGHRRIKPHHIATGTVNPRPQKQYPINPKAKASIQTVINDLLKQGVLIQQNSIMNTPVYPVPKPDGKWRMVLDYREVNKTIPLIAAQNQHSAGILSSIFRGKYKTTLDLSNGFWAHSITPESYWLTAFTWLGQQYCWTRLPQGFLNSPALFNADVVDLLKEVPNVQVYVDDIYISHDDPREHLEQLEKVFSLLLNAGYVVSLKKSEIAQHEVEFLGFNITKEGRGLTETFKQKLLNITPPRDLKQLQSILGKLNFARNFIPNFSELVKPLYNIIATAPGKYITWTTDNSQQLQNIISMLNSAENLEERNPEVRLIMKVNTSPSAGYIRFYNEFAKRPIMYLNYVYTKAEVKFTNTEKLLTTIHKGLIKALDLGMGQEILVYSPIVSMTKIQKTPLPERKALPIRWITWMSYLEDPRIQFHYDKTLPELQQVPTVTDDIIAKIKHPSEFSMVFYTDGSAIKHPNVNKSHNAGMGIAQVQFKPEFTVINTWSIPLGDHTAQLAEVAAVEFACKKALKIDGPVLIVTDSFYVAESVNKELPYWQSNGFFNNKKKPLKHVSKWKSIADCIQLKPDIIIIHEKGHQPTASTFHTEGNNLADKLATQGSYVVNAGKRTADGSEFEKRTADGSEFESPKKKAKVE

SEQ ID NO: 7611 - protein, 2176 aa, synthetic construct
MPAAKRVKLDGGDKKYSIGLDIGTNSVGWAVITDEYKVPSKKFKVLGNTDRHSIKKNLIGALLFDSGETAEATRLKRTARRRYTRRKNRICYLQEIFSNEMAKVDDSFFHRLEESFLVEEDKKHERHPIFGNIVDEVAYHEKYPTIYHLRKKLVDSTDKADLRLIYLALAHMIKFRGHFLIEGDLNPDNSDVDKLFIQLVQTYNQLFEENPINASGVDAKAILSARLSKSRRLENLIAQLPGEKKNGLFGNLIALSLGLTPNFKSNFDLAEDAKLQLSKDTYDDDLDNLLAQIGDQYADLFLAAKNLSDAILLSDILRVNTEITKAPLSASMIKRYDEHHQDLTLLKALVRQQLPEKYKEIFFDQSKNGYAGYIDGGASQEEFYKFIKPILEKMDGTEELLVKLNREDLLRKQRTFDNGSIPHQIHLGELHAILRRQEDFYPFLKDNREKIEKILTFRIPYYVGPLARGNSRFAWMTRKSEETITPWNFEEVVDKGASAQSFIERMTNFDKNLPNEKVLPKHSLLYEYFTVYNELTKVKYVTEGMRKPAFLSGEQKKAIVDLLFKTNRKVTVKQLKEDYFKKIECFDSVEISGVEDRFNASLGTYHDLLKIIKDKDFLDNEENEDILEDIVLTLTLFEDREMIEERLKTYAHLFDDKVMKQLKRRRYTGWGRLSRKLINGIRDKQSGKTILDFLKSDGFANRNFMQLIHDDSLTFKEDIQKAQVSGQGDSLHEHIANLAGSPAIKKGILQTVKVVDELVKVMGRHKPENIVIEMARENQTTQKGQKNSRERMKRIEEGIKELGSQILKEHPVENTQLQNEKLYLYYLQNGRDMYVDQELDINRLSDYDVDHIVPQSFLKDDSIDNKVLTRSDKARGKSDNVPSEEVVKKMKNYWRQLLNAKLITQRKFDNLTKAERGGLSELDKAGFIKRQLVETRQITKHVAQILDSRMNTKYDENDKLIREVKVITLKSKLVSDFRKDFQFYKVREINNYHHAHDAYLNAVVGTALIKKYPKLESEFVYGDYKVYDVRKMIAKSEQEIGKATAKYFFYSNIMNFFKTEITLANGEIRKRPLIETNGETGEIVWDKGRDFATVRKVLSMPQVNIVKKTEVQTGGFSKESILPKRNSDKLIARKKDWDPKKYGGFDSPTVAYSVLVVAKVEKGKSKKLKSVKELLGITIMERSSFEKNPIDFLEAKGYKEVKKDLIIKLPKYSLFELENGRKRMLASAGELQKGNELALPSKYVNFLYLASHYEKLKGSPEDNEQKQLFVEQHKHYLDEIIEQISEFSKRVILADANLDKVLSAYNKHRDKPIREQAENIIHLFTLTNLGAPAAFKYFDTTIDRKRYTSTKEVLDATLIHQSITGLYETRIDLSQLGGDGGEAAAKGSSPAPGGMDPLQLLQPLEAEIKGTKLKAHWNSGATITCVPQAFLEEEVPIKNIWIKTIHGEKEQPVYYLTFKIQGRKVEAEVISSPYDYILVSPSDIPWLMKKPLQLTTLVPLQEYEERLLKQTMLTGSYKEKLQSLFLKYDALWQHWENQVGHRRIKPHHIATGTVNPRPQKQYPINPKAKASIQTVINDLLKQGVLIQQNSIMNTPVYPVPKPDGKWRMVLDYREVNKTIPLIAAQNQHSAGILSSIFRGKYKTTLDLSNGFWAHSITPESYWLTAFTWLGQQYCWTRLPQGFLNSPALFNADVVDLLKEVPNVQVYVDDIYISHDDPREHLEQLEKVFSLLLNAGYVVSLKKSEIAQHEVEFLGFNITKEGRGLTETFKQKLLNITPPRDLKQLQSILGKLNFARNFIPNFSELVKPLYNIIATAPGKYITWTTDNSQQLQNIISMLNSAENLEERNPEVRLIMKVNTSPSAGYIRFYNEFAKRPIMYLNYVYTKAEVKFTNTEKLLTTIHKGLIKALDLGMGQEILVYSPIVSMTKIQKTPLPERKALPIRWITWMSYLEDPRIQFHYDKTLPELQQVPTVTDDIIAKIKHPSEFSMVFYTDGSAIKHPNVNKSHNAGMGIAQVQFKPEFTVINTWSIPLGDHTAQLAEVAAVEFACKKALKIDGPVLIVTDSFYVAESVNKELPYWQSNGFFNNKKKPLKHVSKWKSIADCIQLKPDIIIIHEKGHQPTASTFHTEGNNLADKLATQGSYVVNAGKRTADGSEFEKRTADGSEFESPKKKAKVE

SEQ ID NO: 7612 - protein, 2098 aa, synthetic construct
MPAAKRVKLDGGDKKYSIGLDIGTNSVGWAVITDEYKVPSKKFKVLGNTDRHSIKKNLIGALLFDSGETAEATRLKRTARRRYTRRKNRICYLQEIFSNEMAKVDDSFFHRLEESFLVEEDKKHERHPIFGNIVDEVAYHEKYPTIYHLRKKLVDSTDKADLRLIYLALAHMIKFRGHFLIEGDLNPDNSDVDKLFIQLVQTYNQLFEENPINASGVDAKAILSARLSKSRRLENLIAQLPGEKKNGLFGNLIALSLGLTPNFKSNFDLAEDAKLQLSKDTYDDDLDNLLAQIGDQYADLFLAAKNLSDAILLSDILRVNTEITKAPLSASMIKRYDEHHQDLTLLKALVRQQLPEKYKEIFFDQSKNGYAGYIDGGASQEEFYKFIKPILEKMDGTEELLVKLNREDLLRKQRTFDNGSIPHQIHLGELHAILRRQEDFYPFLKDNREKIEKILTFRIPYYVGPLARGNSRFAWMTRKSEETITPWNFEEVVDKGASAQSFIERMTNFDKNLPNEKVLPKHSLLYEYFTVYNELTKVKYVTEGMRKPAFLSGEQKKAIVDLLFKTNRKVTVKQLKEDYFKKIECFDSVEISGVEDRFNASLGTYHDLLKIIKDKDFLDNEENEDILEDIVLTLTLFEDREMIEERLKTYAHLFDDKVMKQLKRRRYTGWGRLSRKLINGIRDKQSGKTILDFLKSDGFANRNFMQLIHDDSLTFKEDIQKAQVSGQGDSLHEHIANLAGSPAIKKGILQTVKVVDELVKVMGRHKPENIVIEMARENQTTQKGQKNSRERMKRIEEGIKELGSQILKEHPVENTQLQNEKLYLYYLQNGRDMYVDQELDINRLSDYDVDHIVPQSFLKDDSIDNKVLTRSDKARGKSDNVPSEEVVKKMKNYWRQLLNAKLITQRKFDNLTKAERGGLSELDKAGFIKRQLVETRQITKHVAQILDSRMNTKYDENDKLIREVKVITLKSKLVSDFRKDFQFYKVREINNYHHAHDAYLNAVVGTALIKKYPKLESEFVYGDYKVYDVRKMIAKSEQEIGKATAKYFFYSNIMNFFKTEITLANGEIRKRPLIETNGETGEIVWDKGRDFATVRKVLSMPQVNIVKKTEVQTGGFSKESILPKRNSDKLIARKKDWDPKKYGGFDSPTVAYSVLVVAKVEKGKSKKLKSVKELLGITIMERSSFEKNPIDFLEAKGYKEVKKDLIIKLPKYSLFELENGRKRMLASAGELQKGNELALPSKYVNFLYLASHYEKLKGSPEDNEQKQLFVEQHKHYLDEIIEQISEFSKRVILADANLDKVLSAYNKHRDKPIREQAENIIHLFTLTNLGAPAAFKYFDTTIDRKRYTSTKEVLDATLIHQSITGLYETRIDLSQLGGDGGEAAAKPAPGSSGGTAPLEEEYRLFLEAPIQNVTLLEQWKREIPKVWAEINPPGLASTQAPIHVQLLSTALPVRVRQYPITLEAKRSLRETIRKFRAAGILRPVHSPWNTPLLPVRKSGTSEYRMVQDLREVNKRVETIHPTVPNPYTLLSLLPPDRIWYSVLDLKDAFFCIPLAPESQLIFAFEWADAEEGESGQLTWTRLPQGFKNSPTLFNEALNRDLQGFRLDHPSVSLLQYVDDLLIAADTQAACLSATRDLLMTLAELGYRVSGKKAQLCQEEVTYLGFKIHKGSRSLSNSRTQAILQIPVPKTKRQVREFLGKIGYCRLFIPGFAELAQPLYAATRPGNDPLVWGEKEEEAFQSLKLALTQPPALALPSLDKPFQLFVEETSGAAKGVLTQALGPWKRPVAYLSKRLDPVAAGWPRCLRAIAAAALLTREASKLTFGQDIEITSSHNLESLLRSPPDKWLTNARITQYQVLLLDPPRVRFKQTAALNPATLLPETDDTLPIHHCLDTLDSLTSTRPDLTDQPLAQAEATLFTDGSSYIRDGKRYAGAAVVTLDSVIWAEPLPIGTSAQKAELIALTKALEWSKDKSVNIYTDSRYAFATLHVHGMIYRERGWLTAGGKAIKNAPEILALLTAVWLPKRVAVMHCKGHQKDDAPTSTGNRRADEVAREVAIRPLSTQATISAGKRTADGSEFEKRTADGSEFESPKKKAKVE

SEQ ID NO: 7613 - protein, 2102 aa, synthetic construct
MPAAKRVKLDGGDKKYSIGLDIGTNSVGWAVITDEYKVPSKKFKVLGNTDRHSIKKNLIGALLFDSGETAEATRLKRTARRRYTRRKNRICYLQEIFSNEMAKVDDSFFHRLEESFLVEEDKKHERHPIFGNIVDEVAYHEKYPTIYHLRKKLVDSTDKADLRLIYLALAHMIKFRGHFLIEGDLNPDNSDVDKLFIQLVQTYNQLFEENPINASGVDAKAILSARLSKSRRLENLIAQLPGEKKNGLFGNLIALSLGLTPNFKSNFDLAEDAKLQLSKDTYDDDLDNLLAQIGDQYADLFLAAKNLSDAILLSDILRVNTEITKAPLSASMIKRYDEHHQDLTLLKALVRQQLPEKYKEIFFDQSKNGYAGYIDGGASQEEFYKFIKPILEKMDGTEELLVKLNREDLLRKQRTFDNGSIPHQIHLGELHAILRRQEDFYPFLKDNREKIEKILTFRIPYYVGPLARGNSRFAWMTRKSEETITPWNFEEVVDKGASAQSFIERMTNFDKNLPNEKVLPKHSLLYEYFTVYNELTKVKYVTEGMRKPAFLSGEQKKAIVDLLFKTNRKVTVKQLKEDYFKKIECFDSVEISGVEDRFNASLGTYHDLLKIIKDKDFLDNEENEDILEDIVLTLTLFEDREMIEERLKTYAHLFDDKVMKQLKRRRYTGWGRLSRKLINGIRDKQSGKTILDFLKSDGFANRNFMQLIHDDSLTFKEDIQKAQVSGQGDSLHEHIANLAGSPAIKKGILQTVKVVDELVKVMGRHKPENIVIEMARENQTTQKGQKNSRERMKRIEEGIKELGSQILKEHPVENTQLQNEKLYLYYLQNGRDMYVDQELDINRLSDYDVDHIVPQSFLKDDSIDNKVLTRSDKARGKSDNVPSEEVVKKMKNYWRQLLNAKLITQRKFDNLTKAERGGLSELDKAGFIKRQLVETRQITKHVAQILDSRMNTKYDENDKLIREVKVITLKSKLVSDFRKDFQFYKVREINNYHHAHDAYLNAVVGTALIKKYPKLESEFVYGDYKVYDVRKMIAKSEQEIGKATAKYFFYSNIMNFFKTEITLANGEIRKRPLIETNGETGEIVWDKGRDFATVRKVLSMPQVNIVKKTEVQTGGFSKESILPKRNSDKLIARKKDWDPKKYGGFDSPTVAYSVLVVAKVEKGKSKKLKSVKELLGITIMERSSFEKNPIDFLEAKGYKEVKKDLIIKLPKYSLFELENGRKRMLASAGELQKGNELALPSKYVNFLYLASHYEKLKGSPEDNEQKQLFVEQHKHYLDEIIEQISEFSKRVILADANLDKVLSAYNKHRDKPIREQAENIIHLFTLTNLGAPAAFKYFDTTIDRKRYTSTKEVLDATLIHQSITGLYETRIDLSQLGGDGGEAAAKPAPGSSGGTVSLQDEHRLFDIPVTTSLPDVWLQDFPQAWAETGGLGRAKCQAPIIIDLKPTAVPVSIKQYPMSLEAHMGIRQHIIKFLELGVLRPCRSPWNTPLLPVKKPGTQDYRPVQDLREINKRTVDIHPTVPNPYNLLSTLKPDYSWYTVLDLKDAFFCLPLAPQSQELFAFEWKDPERGISGQLTWTRLPQGFKNSPTLFNEALHRDLTDFRTQHPEVTLLQYVDDLLLAAPTKKACTQGTRHLLQELGEKGYRASAKKAQICQTKVTYLGYILSEGKRWLTPGRIETVARIPPPRNPREVREFLGTAGFCRLWIPGFAELAAPLYALTKPSTPFTWQTEHQLAFEALKKALLSAPALGLPDTSKPFTLFLDERQGIAKGVLTQKLGPWKRPVAYLSKKLDPVAAGWPPCLRIMAATAMLVKDSAKLTLGQPLTVITPHTLEAIVRQPPDRWITNARLTHYQALLLDTDRVQFGPPVTLNPATLLPVPENQPSPHDCRQVLAETHGTREDLKDQELPDADHTWYTDGSSYLDSGTRRAGAAVVDGHNTIWAQSLPPGTSAQKAELIALTKALELSKGKKANIYTDSRYAFATAHTHGSIYERRGWLTSEGKEIKNKAEIIALLKALFLPQEVAIIHCPGHQKGQDPVAVGNRQADRVARQAAMAEVLTLATEPDNTSHITAGKRTADGSEFEKRTADGSEFESPKKKAKVE

SEQ ID NO: 7614 - protein, 2173 aa, synthetic construct
MPAAKRVKLDGGDKKYSIGLDIGTNSVGWAVITDEYKVPSKKFKVLGNTDRHSIKKNLIGALLFDSGETAEATRLKRTARRRYTRRKNRICYLQEIFSNEMAKVDDSFFHRLEESFLVEEDKKHERHPIFGNIVDEVAYHEKYPTIYHLRKKLVDSTDKADLRLIYLALAHMIKFRGHFLIEGDLNPDNSDVDKLFIQLVQTYNQLFEENPINASGVDAKAILSARLSKSRRLENLIAQLPGEKKNGLFGNLIALSLGLTPNFKSNFDLAEDAKLQLSKDTYDDDLDNLLAQIGDQYADLFLAAKNLSDAILLSDILRVNTEITKAPLSASMIKRYDEHHQDLTLLKALVRQQLPEKYKEIFFDQSKNGYAGYIDGGASQEEFYKFIKPILEKMDGTEELLVKLNREDLLRKQRTFDNGSIPHQIHLGELHAILRRQEDFYPFLKDNREKIEKILTFRIPYYVGPLARGNSRFAWMTRKSEETITPWNFEEVVDKGASAQSFIERMTNFDKNLPNEKVLPKHSLLYEYFTVYNELTKVKYVTEGMRKPAFLSGEQKKAIVDLLFKTNRKVTVKQLKEDYFKKIECFDSVEISGVEDRFNASLGTYHDLLKIIKDKDFLDNEENEDILEDIVLTLTLFEDREMIEERLKTYAHLFDDKVMKQLKRRRYTGWGRLSRKLINGIRDKQSGKTILDFLKSDGFANRNFMQLIHDDSLTFKEDIQKAQVSGQGDSLHEHIANLAGSPAIKKGILQTVKVVDELVKVMGRHKPENIVIEMARENQTTQKGQKNSRERMKRIEEGIKELGSQILKEHPVENTQLQNEKLYLYYLQNGRDMYVDQELDINRLSDYDVDHIVPQSFLKDDSIDNKVLTRSDKARGKSDNVPSEEVVKKMKNYWRQLLNAKLITQRKFDNLTKAERGGLSELDKAGFIKRQLVETRQITKHVAQILDSRMNTKYDENDKLIREVKVITLKSKLVSDFRKDFQFYKVREINNYHHAHDAYLNAVVGTALIKKYPKLESEFVYGDYKVYDVRKMIAKSEQEIGKATAKYFFYSNIMNFFKTEITLANGEIRKRPLIETNGETGEIVWDKGRDFATVRKVLSMPQVNIVKKTEVQTGGFSKESILPKRNSDKLIARKKDWDPKKYGGFDSPTVAYSVLVVAKVEKGKSKKLKSVKELLGITIMERSSFEKNPIDFLEAKGYKEVKKDLIIKLPKYSLFELENGRKRMLASAGELQKGNELALPSKYVNFLYLASHYEKLKGSPEDNEQKQLFVEQHKHYLDEIIEQISEFSKRVILADANLDKVLSAYNKHRDKPIREQAENIIHLFTLTNLGAPAAFKYFDTTIDRKRYTSTKEVLDATLIHQSITGLYETRIDLSQLGGDGGEAAAKPAPGSSGGMDLLKPLTVERKGVKIKGYWNSQADITCVPKDLLQGEEPVRQQNVTTIHGTQEGDVYYVNLKIDGRRINTEVIGTTLDYAIITPGDVPWILKKPLELTIKLDLEEQQGTLLNNSILSKKGKEELKQLFEKYSALWQSWENQVGHRRIRPHKIATGTVKPTPQKQYHINPKAKPDIQIVINDLLKQGVLIQKESTMNTPVYPVPKPNGRWRMVLDYRAVNKVTPLIAVQNQHSYGILGSLFKGRYKTTIDLSNGFWAHPIVPEDYWITAFTWQGKQYCWTVLPQGFLNSPGLFTGDVVDLLQGIPNVEVYVDDVYISHDSEKEHLEYLDILFNRLKEAGYIISLKKSNIANSIVDFLGFQITNEGRGLTDTFKEKLENITAPTTLKQLQSILGLLNFARNFIPDFTELIAPLYALIPKSTKNYVPWQIEHSTTLETLITKLNGAEYLQGRKGDKTLIMKVNASYTTGYIRYYNEGEKKPISYVSIVFSKTELKFTELEKLLTTVHKGLLKALDLSMGQNIHVYSPIVSMQNIQKTPQTAKKALASRWLSWLSYLEDPRIRFFYDPQMPALKDLPAVDTGKDNKKHPSNFQHIFYTDGSAITSPTKEGHLNAGMGIVYFINKDGNLQKQQEWSISLGNHTAQFAEIAAFEFALKKCLPLGGNILVVTDSNYVAKAYNEELDVWASNGFVNNRKKPLKHISKWKSVADLKRLRPDVVVTHEPGHQKLDSSPHAYGNNLADQLATQASFKVHAGKRTADGSEFEKRTADGSEFESPKKKAKVE

SEQ ID NO: 7615 - protein, 2095 aa, synthetic construct
MPAAKRVKLDGGDKKYSIGLDIGTNSVGWAVITDEYKVPSKKFKVLGNTDRHSIKKNLIGALLFDSGETAEATRLKRTARRRYTRRKNRICYLQEIFSNEMAKVDDSFFHRLEESFLVEEDKKHERHPIFGNIVDEVAYHEKYPTIYHLRKKLVDSTDKADLRLIYLALAHMIKFRGHFLIEGDLNPDNSDVDKLFIQLVQTYNQLFEENPINASGVDAKAILSARLSKSRRLENLIAQLPGEKKNGLFGNLIALSLGLTPNFKSNFDLAEDAKLQLSKDTYDDDLDNLLAQIGDQYADLFLAAKNLSDAILLSDILRVNTEITKAPLSASMIKRYDEHHQDLTLLKALVRQQLPEKYKEIFFDQSKNGYAGYIDGGASQEEFYKFIKPILEKMDGTEELLVKLNREDLLRKQRTFDNGSIPHQIHLGELHAILRRQEDFYPFLKDNREKIEKILTFRIPYYVGPLARGNSRFAWMTRKSEETITPWNFEEVVDKGASAQSFIERMTNFDKNLPNEKVLPKHSLLYEYFTVYNELTKVKYVTEGMRKPAFLSGEQKKAIVDLLFKTNRKVTVKQLKEDYFKKIECFDSVEISGVEDRFNASLGTYHDLLKIIKDKDFLDNEENEDILEDIVLTLTLFEDREMIEERLKTYAHLFDDKVMKQLKRRRYTGWGRLSRKLINGIRDKQSGKTILDFLKSDGFANRNFMQLIHDDSLTFKEDIQKAQVSGQGDSLHEHIANLAGSPAIKKGILQTVKVVDELVKVMGRHKPENIVIEMARENQTTQKGQKNSRERMKRIEEGIKELGSQILKEHPVENTQLQNEKLYLYYLQNGRDMYVDQELDINRLSDYDVDHIVPQSFLKDDSIDNKVLTRSDKARGKSDNVPSEEVVKKMKNYWRQLLNAKLITQRKFDNLTKAERGGLSELDKAGFIKRQLVETRQITKHVAQILDSRMNTKYDENDKLIREVKVITLKSKLVSDFRKDFQFYKVREINNYHHAHDAYLNAVVGTALIKKYPKLESEFVYGDYKVYDVRKMIAKSEQEIGKATAKYFFYSNIMNFFKTEITLANGEIRKRPLIETNGETGEIVWDKGRDFATVRKVLSMPQVNIVKKTEVQTGGFSKESILPKRNSDKLIARKKDWDPKKYGGFDSPTVAYSVLVVAKVEKGKSKKLKSVKELLGITIMERSSFEKNPIDFLEAKGYKEVKKDLIIKLPKYSLFELENGRKRMLASAGELQKGNELALPSKYVNFLYLASHYEKLKGSPEDNEQKQLFVEQHKHYLDEIIEQISEFSKRVILADANLDKVLSAYNKHRDKPIREQAENIIHLFTLTNLGAPAAFKYFDTTIDRKRYTSTKEVLDATLIHQSITGLYETRIDLSQLGGDGGEAAAKPAPGSSGGTLQLEEEYRLFEPESTQKQEMDIWLKNFPQAWAETGGMGTAHCQAPVLIQLKATATPISIRQYPMPHEAYQGIKPHIRRMLDQGILKPCQSPWNTPLLPVKKPGTEDYRPVQDLREVNKRVEDIHPTVPNPYNLLSTLPPSHPWYTVLDLKDAFFCLRLHSESQLLFAFEWRDPEIGLSGQLTWTRLPQGFKNSPTLFNEALHSDLADFRVRYPALVLLQYVDDLLLAAATRTECLEGTKALLETLGNKGYRASAKKAQICLQEVTYLGYSLKDGQRWLTKARKEAILSIPVPKNSRQVREFLGKAGYCRLFIPGFAELAAPLYPLTRPGTLFQWGTEQQLAFEDIKKALLSSPALGLPDITKPFELFIDENSGFAKGVLVQKLGPWKRPVAYLSKKLDTVASGWPPCLRMVAAIAILVKDAGKLTLGQPLTILTSHPVEALVRQPPNKWLSNARMTHYQAMLLDAERVHFGPTVSLNPATLLPLPSGGNHHDCLQILAETHGTRPDLTDQPLPDADLTWYTDGSSFIRNGEREAGAAVTTESEVIWAAPLPPGTSAQRAELIALTQALKMAEGKKLTVYTDSRYAFATTHVHGEIYRRRGWLTSEGKEIKNKNEILALLEALFLPKRLSIIHCPGHQKGDSPQAKGNRLADDTAKKAATETHSSLTVLPAGKRTADGSEFEKRTADGSEFESPKKKAKVE

SEQ ID NO: 7616 - protein, 2087 aa, synthetic construct
MPAAKRVKLDGGDKKYSIGLDIGTNSVGWAVITDEYKVPSKKFKVLGNTDRHSIKKNLIGALLFDSGETAEATRLKRTARRRYTRRKNRICYLQEIFSNEMAKVDDSFFHRLEESFLVEEDKKHERHPIFGNIVDEVAYHEKYPTIYHLRKKLVDSTDKADLRLIYLALAHMIKFRGHFLIEGDLNPDNSDVDKLFIQLVQTYNQLFEENPINASGVDAKAILSARLSKSRRLENLIAQLPGEKKNGLFGNLIALSLGLTPNFKSNFDLAEDAKLQLSKDTYDDDLDNLLAQIGDQYADLFLAAKNLSDAILLSDILRVNTEITKAPLSASMIKRYDEHHQDLTLLKALVRQQLPEKYKEIFFDQSKNGYAGYIDGGASQEEFYKFIKPILEKMDGTEELLVKLNREDLLRKQRTFDNGSIPHQIHLGELHAILRRQEDFYPFLKDNREKIEKILTFRIPYYVGPLARGNSRFAWMTRKSEETITPWNFEEVVDKGASAQSFIERMTNFDKNLPNEKVLPKHSLLYEYFTVYNELTKVKYVTEGMRKPAFLSGEQKKAIVDLLFKTNRKVTVKQLKEDYFKKIECFDSVEISGVEDRFNASLGTYHDLLKIIKDKDFLDNEENEDILEDIVLTLTLFEDREMIEERLKTYAHLFDDKVMKQLKRRRYTGWGRLSRKLINGIRDKQSGKTILDFLKSDGFANRNFMQLIHDDSLTFKEDIQKAQVSGQGDSLHEHIANLAGSPAIKKGILQTVKVVDELVKVMGRHKPENIVIEMARENQTTQKGQKNSRERMKRIEEGIKELGSQILKEHPVENTQLQNEKLYLYYLQNGRDMYVDQELDINRLSDYDVDHIVPQSFLKDDSIDNKVLTRSDKARGKSDNVPSEEVVKKMKNYWRQLLNAKLITQRKFDNLTKAERGGLSELDKAGFIKRQLVETRQITKHVAQILDSRMNTKYDENDKLIREVKVITLKSKLVSDFRKDFQFYKVREINNYHHAHDAYLNAVVGTALIKKYPKLESEFVYGDYKVYDVRKMIAKSEQEIGKATAKYFFYSNIMNFFKTEITLANGEIRKRPLIETNGETGEIVWDKGRDFATVRKVLSMPQVNIVKKTEVQTGGFSKESILPKRNSDKLIARKKDWDPKKYGGFDSPTVAYSVLVVAKVEKGKSKKLKSVKELLGITIMERSSFEKNPIDFLEAKGYKEVKKDLIIKLPKYSLFELENGRKRMLASAGELQKGNELALPSKYVNFLYLASHYEKLKGSPEDNEQKQLFVEQHKHYLDEIIEQISEFSKRVILADANLDKVLSAYNKHRDKPIREQAENIIHLFTLTNLGAPAAFKYFDTTIDRKRYTSTKEVLDATLIHQSITGLYETRIDLSQLGGDGGEAAAKPAPGSSGGVPWLTQQPLQLTILVPLQEYQEKILSKTALPEDQKQQLKTLFVKYDNLWQHWENQVGHRKIRPHNIATGDYPPRPQKQYPINPKAKPSIQIVIDDLLKQGVLTPQNSTMNTPVYPVPKPDGRWRMVLDYREVNKTIPLTAAQNQHSAGILATIVRQKYKTTLDLANGFWAHPITPESYWLTAFTWQGKQYCWTRLPQGFLNSPALFNADVVDLLKEIPNVQVYVDDIYLSHDDPKEHVQQLEKVFQILLQAGYVVSLKKSEIGQKTVEFLGFNITKEGRGLTDTFKTKLLNITPPKDLKQLQSILGKLNFARNFIPNFAELVQPLYNLIAPAKGKYIEWSEENTKQLNMVIEALNTASNLEERLPEQRLVIKVNTSPSAGYVRYYNETGKKPIMYLNYVFSKAELKFSMLEKLLTTMHKALIKAMDLAMGQEILVYSPIVSMTKIQKTPLPERKALPIRWITWMTYLEDPRIQFHYDKTLPELKHIPDVYTSSQSPVKHPSQYEGVFYTDGSAIKSPDPTKSNNAGMGIVHATYKPEYQVLNQWSIPLGNHTAQMAEIAAVEFACKKALKIPGPVLVITDSFYVAESANKELPYWKSNGFVNNKKKPLKHISKWKSIAECLSMKPDITIQHEKGISLQIPVFILKGNALADKLATQGSYVVNAGKRTADGSEFEKRTADGSEFESPKKKAKVE

SEQ ID NO: 7617 - protein, 2094 aa, synthetic construct
MPAAKRVKLDGGDKKYSIGLDIGTNSVGWAVITDEYKVPSKKFKVLGNTDRHSIKKNLIGALLFDSGETAEATRLKRTARRRYTRRKNRICYLQEIFSNEMAKVDDSFFHRLEESFLVEEDKKHERHPIFGNIVDEVAYHEKYPTIYHLRKKLVDSTDKADLRLIYLALAHMIKFRGHFLIEGDLNPDNSDVDKLFIQLVQTYNQLFEENPINASGVDAKAILSARLSKSRRLENLIAQLPGEKKNGLFGNLIALSLGLTPNFKSNFDLAEDAKLQLSKDTYDDDLDNLLAQIGDQYADLFLAAKNLSDAILLSDILRVNTEITKAPLSASMIKRYDEHHQDLTLLKALVRQQLPEKYKEIFFDQSKNGYAGYIDGGASQEEFYKFIKPILEKMDGTEELLVKLNREDLLRKQRTFDNGSIPHQIHLGELHAILRRQEDFYPFLKDNREKIEKILTFRIPYYVGPLARGNSRFAWMTRKSEETITPWNFEEVVDKGASAQSFIERMTNFDKNLPNEKVLPKHSLLYEYFTVYNELTKVKYVTEGMRKPAFLSGEQKKAIVDLLFKTNRKVTVKQLKEDYFKKIECFDSVEISGVEDRFNASLGTYHDLLKIIKDKDFLDNEENEDILEDIVLTLTLFEDREMIEERLKTYAHLFDDKVMKQLKRRRYTGWGRLSRKLINGIRDKQSGKTILDFLKSDGFANRNFMQLIHDDSLTFKEDIQKAQVSGQGDSLHEHIANLAGSPAIKKGILQTVKVVDELVKVMGRHKPENIVIEMARENQTTQKGQKNSRERMKRIEEGIKELGSQILKEHPVENTQLQNEKLYLYYLQNGRDMYVDQELDINRLSDYDVDHIVPQSFLKDDSIDNKVLTRSDKARGKSDNVPSEEVVKKMKNYWRQLLNAKLITQRKFDNLTKAERGGLSELDKAGFIKRQLVETRQITKHVAQILDSRMNTKYDENDKLIREVKVITLKSKLVSDFRKDFQFYKVREINNYHHAHDAYLNAVVGTALIKKYPKLESEFVYGDYKVYDVRKMIAKSEQEIGKATAKYFFYSNIMNFFKTEITLANGEIRKRPLIETNGETGEIVWDKGRDFATVRKVLSMPQVNIVKKTEVQTGGFSKESILPKRNSDKLIARKKDWDPKKYGGFDSPTVAYSVLVVAKVEKGKSKKLKSVKELLGITIMERSSFEKNPIDFLEAKGYKEVKKDLIIKLPKYSLFELENGRKRMLASAGELQKGNELALPSKYVNFLYLASHYEKLKGSPEDNEQKQLFVEQHKHYLDEIIEQISEFSKRVILADANLDKVLSAYNKHRDKPIREQAENIIHLFTLTNLGAPAAFKYFDTTIDRKRYTSTKEVLDATLIHQSITGLYETRIDLSQLGGDGGEAAAKPAPGSSGGVLNLEEEYRLHEKPVPSSIDPSWLQLFPTVWAERAGMGLANQVPPVVVELRSGASPVAVRQYPMSKEAREGIRPHIQKFLDLGVLVPCRSPWNTPLLPVKKPGTNDYRPVQDLREINKRVQDIHPTVPNPYNLLSSLPPSYTWYSVLDLKDAFFCLRLHPNSQPLFAFEWKDPEKGNTGQLTWTRLPQGFKNSPTLFNEALHRDLAPFRALNPQVVLLQYVDDLLVAAPTYEDCKKGTQKLLQELSKLGYRVSAKKAQLCQREVTYLGYLLKEGKRWLTPARKATVMKIPVPTTPRQVREFLGTAGFCRLWIPGFASLAAPLYPLTKPSIPFIWTEEHQQAFDHIKKALLSAPALALPDLTKPFTLYIDERAGVARGVLTQTLGPWRRPVAYLSKKLDPVASGWPTCLKAVAAVALLLKDADKLTLGQNVTVIASHSLESIVRQPPDRWMTNARMTHYQSLLLNERVSFAPPAVLNPATLLPVESEATPVHRCSEILAEETGTRRDLEDQPLPGVPTWYTDGSSFITEGKRRAGAPIVDGKRTVWASSLPEGTSAQKAELVALTQALRLAEGKNINIYTDSRYAFATAHIHGAIYKQRGWLTSAGKDIKNKEEILALLEAIHLPRRVAIIHCPGHQRGSNPVATGNRRADEAAKQAALSTRVLAGTTKPAGKRTADGSEFEKRTADGSEFESPKKKAKVE

SEQ ID NO: 7618 - protein, 2094 aa, synthetic construct
MPAAKRVKLDGGDKKYSIGLDIGTNSVGWAVITDEYKVPSKKFKVLGNTDRHSIKKNLIGALLFDSGETAEATRLKRTARRRYTRRKNRICYLQEIFSNEMAKVDDSFFHRLEESFLVEEDKKHERHPIFGNIVDEVAYHEKYPTIYHLRKKLVDSTDKADLRLIYLALAHMIKFRGHFLIEGDLNPDNSDVDKLFIQLVQTYNQLFEENPINASGVDAKAILSARLSKSRRLENLIAQLPGEKKNGLFGNLIALSLGLTPNFKSNFDLAEDAKLQLSKDTYDDDLDNLLAQIGDQYADLFLAAKNLSDAILLSDILRVNTEITKAPLSASMIKRYDEHHQDLTLLKALVRQQLPEKYKEIFFDQSKNGYAGYIDGGASQEEFYKFIKPILEKMDGTEELLVKLNREDLLRKQRTFDNGSIPHQIHLGELHAILRRQEDFYPFLKDNREKIEKILTFRIPYYVGPLARGNSRFAWMTRKSEETITPWNFEEVVDKGASAQSFIERMTNFDKNLPNEKVLPKHSLLYEYFTVYNELTKVKYVTEGMRKPAFLSGEQKKAIVDLLFKTNRKVTVKQLKEDYFKKIECFDSVEISGVEDRFNASLGTYHDLLKIIKDKDFLDNEENEDILEDIVLTLTLFEDREMIEERLKTYAHLFDDKVMKQLKRRRYTGWGRLSRKLINGIRDKQSGKTILDFLKSDGFANRNFMQLIHDDSLTFKEDIQKAQVSGQGDSLHEHIANLAGSPAIKKGILQTVKVVDELVKVMGRHKPENIVIEMARENQTTQKGQKNSRERMKRIEEGIKELGSQILKEHPVENTQLQNEKLYLYYLQNGRDMYVDQELDINRLSDYDVDHIVPQSFLKDDSIDNKVLTRSDKARGKSDNVPSEEVVKKMKNYWRQLLNAKLITQRKFDNLTKAERGGLSELDKAGFIKRQLVETRQITKHVAQILDSRMNTKYDENDKLIREVKVITLKSKLVSDFRKDFQFYKVREINNYHHAHDAYLNAVVGTALIKKYPKLESEFVYGDYKVYDVRKMIAKSEQEIGKATAKYFFYSNIMNFFKTEITLANGEIRKRPLIETNGETGEIVWDKGRDFATVRKVLSMPQVNIVKKTEVQTGGFSKESILPKRNSDKLIARKKDWDPKKYGGFDSPTVAYSVLVVAKVEKGKSKKLKSVKELLGITIMERSSFEKNPIDFLEAKGYKEVKKDLIIKLPKYSLFELENGRKRMLASAGELQKGNELALPSKYVNFLYLASHYEKLKGSPEDNEQKQLFVEQHKHYLDEIIEQISEFSKRVILADANLDKVLSAYNKHRDKPIREQAENIIHLFTLTNLGAPAAFKYFDTTIDRKRYTSTKEVLDATLIHQSITGLYETRIDLSQLGGDGGEAAAKPAPGSSGGVLNLEEEYRLHEKPVPSSIDPSWLQLFPTVWAERAGMGLANQVPPVVVELRSGASPVAVRQYPMSKEAREGIRPHIQKFLDLGVLVPCRSPWNTPLLPVKKPGTNDYRPVQDLREINKRVQDIHPTVPNPYNLLSSLPPSYTWYSVLDLKDAFFCLRLHPNSQPLFAFEWKDPEKGNTGQLTWTRLPQGFKNSPTLFNEALHRDLAPFRALNPQVVLLQYVDDLLVAAPTYEDCKKGTQKLLQELSKLGYRVSAKKAQLCQREVTYLGYLLKEGKRWLTPARKATVMKIPVPTTPRQVREFLGKAGFCRLFIPGFASLAAPLYPLTKPSIPFIWTEEHQQAFDHIKKALLSAPALALPDLTKPFTLYIDERAGVARGVLTQTLGPWRRPVAYLSKKLDPVASGWPTCLKAVAAVALLLKDADKLTLGQNVTVIASHSLESIVRQPPDRWMTNARMTHYQSLLLNERVSFAPPAVLNPATLLPVESEATPVHRCSEILAEETGTRRDLEDQPLPGVPTWYTDGSSFITEGKRRAGAPIVDGKRTVWASSLPEGTSAQKAELVALTQALRLAEGKNINIYTDSRYAFATAHIHGAIYKQRGWLTSAGKDIKNKEEILALLEAIHLPRRVAIIHCPGHQRGSNPVATGNRRADEAAKQAALSTRVLAGTTKPAGKRTADGSEFEKRTADGSEFESPKKKAKVE

SEQ ID NO: 7619 - protein, 2218 aa, synthetic construct
MPAAKRVKLDGGDKKYSIGLDIGTNSVGWAVITDEYKVPSKKFKVLGNTDRHSIKKNLIGALLFDSGETAEATRLKRTARRRYTRRKNRICYLQEIFSNEMAKVDDSFFHRLEESFLVEEDKKHERHPIFGNIVDEVAYHEKYPTIYHLRKKLVDSTDKADLRLIYLALAHMIKFRGHFLIEGDLNPDNSDVDKLFIQLVQTYNQLFEENPINASGVDAKAILSARLSKSRRLENLIAQLPGEKKNGLFGNLIALSLGLTPNFKSNFDLAEDAKLQLSKDTYDDDLDNLLAQIGDQYADLFLAAKNLSDAILLSDILRVNTEITKAPLSASMIKRYDEHHQDLTLLKALVRQQLPEKYKEIFFDQSKNGYAGYIDGGASQEEFYKFIKPILEKMDGTEELLVKLNREDLLRKQRTFDNGSIPHQIHLGELHAILRRQEDFYPFLKDNREKIEKILTFRIPYYVGPLARGNSRFAWMTRKSEETITPWNFEEVVDKGASAQSFIERMTNFDKNLPNEKVLPKHSLLYEYFTVYNELTKVKYVTEGMRKPAFLSGEQKKAIVDLLFKTNRKVTVKQLKEDYFKKIECFDSVEISGVEDRFNASLGTYHDLLKIIKDKDFLDNEENEDILEDIVLTLTLFEDREMIEERLKTYAHLFDDKVMKQLKRRRYTGWGRLSRKLINGIRDKQSGKTILDFLKSDGFANRNFMQLIHDDSLTFKEDIQKAQVSGQGDSLHEHIANLAGSPAIKKGILQTVKVVDELVKVMGRHKPENIVIEMARENQTTQKGQKNSRERMKRIEEGIKELGSQILKEHPVENTQLQNEKLYLYYLQNGRDMYVDQELDINRLSDYDVDHIVPQSFLKDDSIDNKVLTRSDKARGKSDNVPSEEVVKKMKNYWRQLLNAKLITQRKFDNLTKAERGGLSELDKAGFIKRQLVETRQITKHVAQILDSRMNTKYDENDKLIREVKVITLKSKLVSDFRKDFQFYKVREINNYHHAHDAYLNAVVGTALIKKYPKLESEFVYGDYKVYDVRKMIAKSEQEIGKATAKYFFYSNIMNFFKTEITLANGEIRKRPLIETNGETGEIVWDKGRDFATVRKVLSMPQVNIVKKTEVQTGGFSKESILPKRNSDKLIARKKDWDPKKYGGFDSPTVAYSVLVVAKVEKGKSKKLKSVKELLGITIMERSSFEKNPIDFLEAKGYKEVKKDLIIKLPKYSLFELENGRKRMLASAGELQKGNELALPSKYVNFLYLASHYEKLKGSPEDNEQKQLFVEQHKHYLDEIIEQISEFSKRVILADANLDKVLSAYNKHRDKPIREQAENIIHLFTLTNLGAPAAFKYFDTTIDRKRYTSTKEVLDATLIHQSITGLYETRIDLSQLGGDGGEAAAKPAPGSSGGTLGDQGSRGSDPLPEPRVTLTVEGIPTEFLVNTGAEHSVLTKPMGKMGSKRTVVAGATGSKVYPWTTKRLLKIGQKQVTHSFLVIPECPAPLLGRDLLTKLKAQIQFSTEGPQVTWEDRPAMCLVLNLEEEYRLHEKPVPPSIDPSWLQLFPMVWAEKAGMGLANQVPPVVVELKSDASPVAVRQYPMSKEAREGIRPHIQRFLDLGILVPCQSPWNTPLLPVKKPGTNDYRPVQDLREVNKRVQDIHPTVPNPYNLLSSLPPSHTWYSVLDLKDAFFCLKLHPNSQPLFAFEWRDPEKGNTGQLTWTRLPQGFKNSPTLFDEALHRDLASFRALNPQVVMLQYVDDLLVAAPTYRDCKEGTRRLLQELSKLGYRVSAKKAQLCREEVTYLGYLLKGGKRWLTPARKATVMKIPTPTTPRQVREFLGTAGFCRLWIPGFASLAAPLYPLTREKVPFTWTEAHQEAFGRIKEALLSAPALALPDLTKPFALYVDEKEGVARGVLTQTLGPWRRPVAYLSKKLDPVASGWPTCLKAIAAVALLLKDADKLTLGQNVLVIAPHNLESIVRQPPDRWMTNARMTHYQSLLLNERVSFAPPAILNPATLLPVESDDTPIHICSEILAEETGTRPDLRDQPLPGVPAWYTDGSSFIMDGRRQAGAAIVDNKRTVWASNLPEGTSAQKAELIALTQALRLAEGKSINIYTDSRYAFATAHVHGAIYKQRGLLTSAGKDIKNKEEILALLEAIHLPKRVAIIHCPGHQRGTDPVATGNRKADEAAKQAAQSTRILTETTKNAGKRTADGSEFEKRTADGSEFESPKKKAKVE

SEQ ID NO: 7620 - protein, 2218 aa, synthetic construct
MPAAKRVKLDGGDKKYSIGLDIGTNSVGWAVITDEYKVPSKKFKVLGNTDRHSIKKNLIGALLFDSGETAEATRLKRTARRRYTRRKNRICYLQEIFSNEMAKVDDSFFHRLEESFLVEEDKKHERHPIFGNIVDEVAYHEKYPTIYHLRKKLVDSTDKADLRLIYLALAHMIKFRGHFLIEGDLNPDNSDVDKLFIQLVQTYNQLFEENPINASGVDAKAILSARLSKSRRLENLIAQLPGEKKNGLFGNLIALSLGLTPNFKSNFDLAEDAKLQLSKDTYDDDLDNLLAQIGDQYADLFLAAKNLSDAILLSDILRVNTEITKAPLSASMIKRYDEHHQDLTLLKALVRQQLPEKYKEIFFDQSKNGYAGYIDGGASQEEFYKFIKPILEKMDGTEELLVKLNREDLLRKQRTFDNGSIPHQIHLGELHAILRRQEDFYPFLKDNREKIEKILTFRIPYYVGPLARGNSRFAWMTRKSEETITPWNFEEVVDKGASAQSFIERMTNFDKNLPNEKVLPKHSLLYEYFTVYNELTKVKYVTEGMRKPAFLSGEQKKAIVDLLFKTNRKVTVKQLKEDYFKKIECFDSVEISGVEDRFNASLGTYHDLLKIIKDKDFLDNEENEDILEDIVLTLTLFEDREMIEERLKTYAHLFDDKVMKQLKRRRYTGWGRLSRKLINGIRDKQSGKTILDFLKSDGFANRNFMQLIHDDSLTFKEDIQKAQVSGQGDSLHEHIANLAGSPAIKKGILQTVKVVDELVKVMGRHKPENIVIEMARENQTTQKGQKNSRERMKRIEEGIKELGSQILKEHPVENTQLQNEKLYLYYLQNGRDMYVDQELDINRLSDYDVDHIVPQSFLKDDSIDNKVLTRSDKARGKSDNVPSEEVVKKMKNYWRQLLNAKLITQRKFDNLTKAERGGLSELDKAGFIKRQLVETRQITKHVAQILDSRMNTKYDENDKLIREVKVITLKSKLVSDFRKDFQFYKVREINNYHHAHDAYLNAVVGTALIKKYPKLESEFVYGDYKVYDVRKMIAKSEQEIGKATAKYFFYSNIMNFFKTEITLANGEIRKRPLIETNGETGEIVWDKGRDFATVRKVLSMPQVNIVKKTEVQTGGFSKESILPKRNSDKLIARKKDWDPKKYGGFDSPTVAYSVLVVAKVEKGKSKKLKSVKELLGITIMERSSFEKNPIDFLEAKGYKEVKKDLIIKLPKYSLFELENGRKRMLASAGELQKGNELALPSKYVNFLYLASHYEKLKGSPEDNEQKQLFVEQHKHYLDEIIEQISEFSKRVILADANLDKVLSAYNKHRDKPIREQAENIIHLFTLTNLGAPAAFKYFDTTIDRKRYTSTKEVLDATLIHQSITGLYETRIDLSQLGGDGGEAAAKPAPGSSGGTLGDQGSRGSDPLPEPRVTLTVEGIPTEFLVNTGAEHSVLTKPMGKMGSKRTVVAGATGSKVYPWTTKRLLKIGQKQVTHSFLVIPECPAPLLGRDLLTKLKAQIQFSTEGPQVTWEDRPAMCLVLNLEEEYRLHEKPVPPSIDPSWLQLFPMVWAEKAGMGLANQVPPVVVELKSDASPVAVRQYPMSKEAREGIRPHIQRFLDLGILVPCQSPWNTPLLPVKKPGTNDYRPVQDLREVNKRVQDIHPTVPNPYNLLSSLPPSHTWYSVLDLKDAFFCLKLHPNSQPLFAFEWRDPEKGNTGQLTWTRLPQGFKNSPTLFNEALHRDLASFRALNPQVVMLQYVDDLLVAAPTYRDCKEGTRRLLQELSKLGYRVSAKKAQLCREEVTYLGYLLKGGKRWLTPARKATVMKIPTPTTPRQVREFLGTAGFCRLWIPGFASLAAPLYPLTRPKVPFTWTEAHQEAFGRIKEALLSAPALALPDLTKPFALYVDEKEGVARGVLTQTLGPWRRPVAYLSKKLDPVASGWPTCLKAIAAVALLLKDADKLTLGQNVLVIAPHNLESIVRQPPDRWMTNARMTHYQSLLLNERVSFAPPAILNPATLLPVESDDTPIHICSEILAEETGTRPDLRDQPLPGVPAWYTDGSSFIMDGRRQAGAAIVDNKRTVWASNLPEGTSAQKAELIALTQALRLAEGKSINIYTDSRYAFATAHVHGAIYKQRGWLTSAGKDIKNKEEILALLEAIHLPKRVAIIHCPGHQRGTDPVATGNRKADEAAKQAAQSTRILTETTKNAGKRTADGSEFEKRTADGSEFESPKKKAKVE

SEQ ID NO: 7621 - protein, 2096 aa, synthetic construct
MPAAKRVKLDGGDKKYSIGLDIGTNSVGWAVITDEYKVPSKKFKVLGNTDRHSIKKNLIGALLFDSGETAEATRLKRTARRRYTRRKNRICYLQEIFSNEMAKVDDSFFHRLEESFLVEEDKKHERHPIFGNIVDEVAYHEKYPTIYHLRKKLVDSTDKADLRLIYLALAHMIKFRGHFLIEGDLNPDNSDVDKLFIQLVQTYNQLFEENPINASGVDAKAILSARLSKSRRLENLIAQLPGEKKNGLFGNLIALSLGLTPNFKSNFDLAEDAKLQLSKDTYDDDLDNLLAQIGDQYADLFLAAKNLSDAILLSDILRVNTEITKAPLSASMIKRYDEHHQDLTLLKALVRQQLPEKYKEIFFDQSKNGYAGYIDGGASQEEFYKFIKPILEKMDGTEELLVKLNREDLLRKQRTFDNGSIPHQIHLGELHAILRRQEDFYPFLKDNREKIEKILTFRIPYYVGPLARGNSRFAWMTRKSEETITPWNFEEVVDKGASAQSFIERMTNFDKNLPNEKVLPKHSLLYEYFTVYNELTKVKYVTEGMRKPAFLSGEQKKAIVDLLFKTNRKVTVKQLKEDYFKKIECFDSVEISGVEDRFNASLGTYHDLLKIIKDKDFLDNEENEDILEDIVLTLTLFEDREMIEERLKTYAHLFDDKVMKQLKRRRYTGWGRLSRKLINGIRDKQSGKTILDFLKSDGFANRNFMQLIHDDSLTFKEDIQKAQVSGQGDSLHEHIANLAGSPAIKKGILQTVKVVDELVKVMGRHKPENIVIEMARENQTTQKGQKNSRERMKRIEEGIKELGSQILKEHPVENTQLQNEKLYLYYLQNGRDMYVDQELDINRLSDYDVDHIVPQSFLKDDSIDNKVLTRSDKARGKSDNVPSEEVVKKMKNYWRQLLNAKLITQRKFDNLTKAERGGLSELDKAGFIKRQLVETRQITKHVAQILDSRMNTKYDENDKLIREVKVITLKSKLVSDFRKDFQFYKVREINNYHHAHDAYLNAVVGTALIKKYPKLESEFVYGDYKVYDVRKMIAKSEQEIGKATAKYFFYSNIMNFFKTEITLANGEIRKRPLIETNGETGEIVWDKGRDFATVRKVLSMPQVNIVKKTEVQTGGFSKESILPKRNSDKLIARKKDWDPKKYGGFDSPTVAYSVLVVAKVEKGKSKKLKSVKELLGITIMERSSFEKNPIDFLEAKGYKEVKKDLIIKLPKYSLFELENGRKRMLASAGELQKGNELALPSKYVNFLYLASHYEKLKGSPEDNEQKQLFVEQHKHYLDEIIEQISEFSKRVILADANLDKVLSAYNKHRDKPIREQAENIIHLFTLTNLGAPAAFKYFDTTIDRKRYTSTKEVLDATLIHQSITGLYETRIDLSQLGGDGGEAAAKPAPGSSGGTLNLEDEYRLYETSAEPEVSPGSTWLSDFPQAWAETGGMGLAVRQAPLIIPLKATSTPVSIKQYPMSQEAKLGIKPHIQRLLDQGILVPCQSPWNTPLLPVKKPGTNDYRPVQDLREVNKRVEDIHPTVPNPYNLLSGLPPSHRWYTVLDLKDAFFCLRLHPTSQPLFAFEWRDPGMGISGQLTWTRLPQGFKNSPTLFNEALHRDLADFRIQHPDLILLQYVDDILLAATSELDCQQGTRALLLTLGNLGYRASAKKAQLCQKQVKYLGYLLKEGQRWLTEARKETVMGQPTPKTPRQLREFLGKAGFCRLFIPGFAEMAAPLYPLTKPGTLFNWGPDQQKAYQEIKQALLTAPALGLPDLTKPFELFVDEKQGYAKGVLTQKLGPWRRPVAYLSKKLDPVAAGWPPCLRMVAAIAVLRKDAGKLTMGQPLVILAPHAVEALVKQPPDRWLSNARMTHYQAMLLDTDRVQFGPVVALNPATLLPLPEEGAPHDCLEILAETHGTRPDLTDQPIPDADHTWYTDGSSFLQEGQRKAGAAVTTETEVIWARALPAGTSAQRAELIALTQALKMAEGKRLNVYTDSRYAFATAHIHGEIYRRRGWLTSEGREIKNKSEILALLKALFLPKRLSIIHCLGHQKGDSAEARGNRLADQAAREAAIKTPPDTSTLLAGKRTADGSEFEKRTADGSEFESPKKKAKVE

SEQ ID NO: 7622 - protein, 2096 aa, synthetic construct
MPAAKRVKLDGGDKKYSIGLDIGTNSVGWAVITDEYKVPSKKFKVLGNTDRHSIKKNLIGALLFDSGETAEATRLKRTARRRYTRRKNRICYLQEIFSNEMAKVDDSFFHRLEESFLVEEDKKHERHPIFGNIVDEVAYHEKYPTIYHLRKKLVDSTDKADLRLIYLALAHMIKFRGHFLIEGDLNPDNSDVDKLFIQLVQTYNQLFEENPINASGVDAKAILSARLSKSRRLENLIAQLPGEKKNGLFGNLIALSLGLTPNFKSNFDLAEDAKLQLSKDTYDDDLDNLLAQIGDQYADLFLAAKNLSDAILLSDILRVNTEITKAPLSASMIKRYDEHHQDLTLLKALVRQQLPEKYKEIFFDQSKNGYAGYIDGGASQEEFYKFIKPILEKMDGTEELLVKLNREDLLRKQRTFDNGSIPHQIHLGELHAILRRQEDFYPFLKDNREKIEKILTFRIPYYVGPLARGNSRFAWMTRKSEETITPWNFEEVVDKGASAQSFIERMTNFDKNLPNEKVLPKHSLLYEYFTVYNELTKVKYVTEGMRKPAFLSGEQKKAIVDLLFKTNRKVTVKQLKEDYFKKIECFDSVEISGVEDRFNASLGTYHDLLKIIKDKDFLDNEENEDILEDIVLTLTLFEDREMIEERLKTYAHLFDDKVMKQLKRRRYTGWGRLSRKLINGIRDKQSGKTILDFLKSDGFANRNFMQLIHDDSLTFKEDIQKAQVSGQGDSLHEHIANLAGSPAIKKGILQTVKVVDELVKVMGRHKPENIVIEMARENQTTQKGQKNSRERMKRIEEGIKELGSQILKEHPVENTQLQNEKLYLYYLQNGRDMYVDQELDINRLSDYDVDHIVPQSFLKDDSIDNKVLTRSDKARGKSDNVPSEEVVKKMKNYWRQLLNAKLITQRKFDNLTKAERGGLSELDKAGFIKRQLVETRQITKHVAQILDSRMNTKYDENDKLIREVKVITLKSKLVSDFRKDFQFYKVREINNYHHAHDAYLNAVVGTALIKKYPKLESEFVYGDYKVYDVRKMIAKSEQEIGKATAKYFFYSNIMNFFKTEITLANGEIRKRPLIETNGETGEIVWDKGRDFATVRKVLSMPQVNIVKKTEVQTGGFSKESILPKRNSDKLIARKKDWDPKKYGGFDSPTVAYSVLVVAKVEKGKSKKLKSVKELLGITIMERSSFEKNPIDFLEAKGYKEVKKDLIIKLPKYSLFELENGRKRMLASAGELQKGNELALPSKYVNFLYLASHYEKLKGSPEDNEQKQLFVEQHKHYLDEIIEQISEFSKRVILADANLDKVLSAYNKHRDKPIREQAENIIHLFTLTNLGAPAAFKYFDTTIDRKRYTSTKEVLDATLIHQSITGLYETRIDLSQLGGDGGEAAAKPAPGSSGGTLNIEDEYRLHETSKGPDVPLGSTWLSDFPQAWAETGGMGLAFRQAPLIISLKATSTPVSIKQYPMSQEARLGIKPHIQRLLDQGILVPCQSPWNTPLLPVKKPGTNDYRPVQDLREVNKRVEDIHPTVPNPYNLLSGLPPSHQWYTVLDLKDAFFCLRLHPTSQSLFAFEWKDPEMGISGQLTWTRLPQGFKNSPTLFNEALHRDLADFRIQHPDLILLQYVDDLLLAATSELDCQQGTRALLQTLGDLGYRASAKKAQICQKQVKYLGYLLKEGQRWLTEARKETVMGQPTPKTPRQLREFLGKAGLCRLFIPGFAEMAAPLYPLTKPGTLFKWGPDQQKAYQEIKQALLTAPALGLPDLTKPFELFVDEKQGYAKGVLTQKLGPWRRPVAYLSKKLDPVAAGWPPCLRMVAAIAVLTKDVGKLTMGQPLVILAPHAVEALVKQPPDRWLSNARMTHYQALLLDTDRVQFGPIVALNPATLLPLPEEGLQHDCLDILAEAHGTRPDLTDQPLPDADHTWYTDGSSFLQEGQRRAGAAVTTETEVIWAKALPAGTSAQRAELIALTQALKMAAGKKLNVYTDSRYAFATAHIHGEIYRRRGWLTSEGKEIKNKDEILALLKALFLPKRLSIIHCPGHQKGNHAEARGNRMADQAAREVATRETPETSTLLAGKRTADGSEFEKRTADGSEFESPKKKAKVE

SEQ ID NO: 7623 - protein, 2096 aa, synthetic construct
MPAAKRVKLDGGDKKYSIGLDIGTNSVGWAVITDEYKVPSKKFKVLGNTDRHSIKKNLIGALLFDSGETAEATRLKRTARRRYTRRKNRICYLQEIFSNEMAKVDDSFFHRLEESFLVEEDKKHERHPIFGNIVDEVAYHEKYPTIYHLRKKLVDSTDKADLRLIYLALAHMIKFRGHFLIEGDLNPDNSDVDKLFIQLVQTYNQLFEENPINASGVDAKAILSARLSKSRRLENLIAQLPGEKKNGLFGNLIALSLGLTPNFKSNFDLAEDAKLQLSKDTYDDDLDNLLAQIGDQYADLFLAAKNLSDAILLSDILRVNTEITKAPLSASMIKRYDEHHQDLTLLKALVRQQLPEKYKEIFFDQSKNGYAGYIDGGASQEEFYKFIKPILEKMDGTEELLVKLNREDLLRKQRTFDNGSIPHQIHLGELHAILRRQEDFYPFLKDNREKIEKILTFRIPYYVGPLARGNSRFAWMTRKSEETITPWNFEEVVDKGASAQSFIERMTNFDKNLPNEKVLPKHSLLYEYFTVYNELTKVKYVTEGMRKPAFLSGEQKKAIVDLLFKTNRKVTVKQLKEDYFKKIECFDSVEISGVEDRFNASLGTYHDLLKIIKDKDFLDNEENEDILEDIVLTLTLFEDREMIEERLKTYAHLFDDKVMKQLKRRRYTGWGRLSRKLINGIRDKQSGKTILDFLKSDGFANRNFMQLIHDDSLTFKEDIQKAQVSGQGDSLHEHIANLAGSPAIKKGILQTVKVVDELVKVMGRHKPENIVIEMARENQTTQKGQKNSRERMKRIEEGIKELGSQILKEHPVENTQLQNEKLYLYYLQNGRDMYVDQELDINRLSDYDVDHIVPQSFLKDDSIDNKVLTRSDKARGKSDNVPSEEVVKKMKNYWRQLLNAKLITQRKFDNLTKAERGGLSELDKAGFIKRQLVETRQITKHVAQILDSRMNTKYDENDKLIREVKVITLKSKLVSDFRKDFQFYKVREINNYHHAHDAYLNAVVGTALIKKYPKLESEFVYGDYKVYDVRKMIAKSEQEIGKATAKYFFYSNIMNFFKTEITLANGEIRKRPLIETNGETGEIVWDKGRDFATVRKVLSMPQVNIVKKTEVQTGGFSKESILPKRNSDKLIARKKDWDPKKYGGFDSPTVAYSVLVVAKVEKGKSKKLKSVKELLGITIMERSSFEKNPIDFLEAKGYKEVKKDLIIKLPKYSLFELENGRKRMLASAGELQKGNELALPSKYVNFLYLASHYEKLKGSPEDNEQKQLFVEQHKHYLDEIIEQISEFSKRVILADANLDKVLSAYNKHRDKPIREQAENIIHLFTLTNLGAPAAFKYFDTTIDRKRYTSTKEVLDATLIHQSITGLYETRIDLSQLGGDGGEAAAKPAPGSSGGTLNIEDEHRLHETSKEPDVSLGSTWLSDFPQAWAETGGMGLAVRQAPLIIPLKATSTPVSIKQYPMSQEARLGIKPHIQRLLDQGILVPCQSPWNTPLLPVKKPGTNDYRPVQDLREVNKRVEDIHPTVPNPYNLLSGLPPSHQWYTVLDLKDAFFCLRLHPTSQPLFAFEWRDPEMGISGQLTWTRLPQGFKNSPTLFDEALHRDLADFRIQHPDLILLQYVDDLLLAATSELDCQQGTRALLQTLGNLGYRASAKKAQICQKQVKYLGYLLKEGQRWLTEARKETVMGQPTPKTPRQLREFLGTAGFCRLWIPGFAEMAAPLYPLTKTGTLFNWGPDQQKAYQEIKQALLTAPALGLPDLTKPFELFVDEKQGYAKGVLTQKLGPWRRPVAYLSKKLDPVAAGWPPCLRMVAAIAVLTKDAGKLTMGQPLVILAPHAVEALVKQPPDRWLSNARMTHYQALLLDTDRVQFGPVVALNPATLLPLPEEGLQHNCLDILAEAHGTRPDLTDQPLPDADHTWYTDGSSLLQEGQRKAGAAVTTETEVIWAKALPAGTSAQRAELIALTQALKMAEGKKLNVYTDSRYAFATAHIHGEIYRRRGLLTSEGKEIKNKDEILALLKALFLPKRLSIIHCPGHQKGHSAEARGNRMADQAARKAAITETPDTSTLLAGKRTADGSEFEKRTADGSEFESPKKKAKVE

SEQ ID NO: 7624 - protein, 2090 aa, synthetic construct
MPAAKRVKLDGGDKKYSIGLDIGTNSVGWAVITDEYKVPSKKFKVLGNTDRHSIKKNLIGALLFDSGETAEATRLKRTARRRYTRRKNRICYLQEIFSNEMAKVDDSFFHRLEESFLVEEDKKHERHPIFGNIVDEVAYHEKYPTIYHLRKKLVDSTDKADLRLIYLALAHMIKFRGHFLIEGDLNPDNSDVDKLFIQLVQTYNQLFEENPINASGVDAKAILSARLSKSRRLENLIAQLPGEKKNGLFGNLIALSLGLTPNFKSNFDLAEDAKLQLSKDTYDDDLDNLLAQIGDQYADLFLAAKNLSDAILLSDILRVNTEITKAPLSASMIKRYDEHHQDLTLLKALVRQQLPEKYKEIFFDQSKNGYAGYIDGGASQEEFYKFIKPILEKMDGTEELLVKLNREDLLRKQRTFDNGSIPHQIHLGELHAILRRQEDFYPFLKDNREKIEKILTFRIPYYVGPLARGNSRFAWMTRKSEETITPWNFEEVVDKGASAQSFIERMTNFDKNLPNEKVLPKHSLLYEYFTVYNELTKVKYVTEGMRKPAFLSGEQKKAIVDLLFKTNRKVTVKQLKEDYFKKIECFDSVEISGVEDRFNASLGTYHDLLKIIKDKDFLDNEENEDILEDIVLTLTLFEDREMIEERLKTYAHLFDDKVMKQLKRRRYTGWGRLSRKLINGIRDKQSGKTILDFLKSDGFANRNFMQLIHDDSLTFKEDIQKAQVSGQGDSLHEHIANLAGSPAIKKGILQTVKVVDELVKVMGRHKPENIVIEMARENQTTQKGQKNSRERMKRIEEGIKELGSQILKEHPVENTQLQNEKLYLYYLQNGRDMYVDQELDINRLSDYDVDHIVPQSFLKDDSIDNKVLTRSDKARGKSDNVPSEEVVKKMKNYWRQLLNAKLITQRKFDNLTKAERGGLSELDKAGFIKRQLVETRQITKHVAQILDSRMNTKYDENDKLIREVKVITLKSKLVSDFRKDFQFYKVREINNYHHAHDAYLNAVVGTALIKKYPKLESEFVYGDYKVYDVRKMIAKSEQEIGKATAKYFFYSNIMNFFKTEITLANGEIRKRPLIETNGETGEIVWDKGRDFATVRKVLSMPQVNIVKKTEVQTGGFSKESILPKRNSDKLIARKKDWDPKKYGGFDSPTVAYSVLVVAKVEKGKSKKLKSVKELLGITIMERSSFEKNPIDFLEAKGYKEVKKDLIIKLPKYSLFELENGRKRMLASAGELQKGNELALPSKYVNFLYLASHYEKLKGSPEDNEQKQLFVEQHKHYLDEIIEQISEFSKRVILADANLDKVLSAYNKHRDKPIREQAENIIHLFTLTNLGAPAAFKYFDTTIDRKRYTSTKEVLDATLIHQSITGLYETRIDLSQLGGDGGEAAAKPAPGSSGGTLQLDDEYRLYSPLVKPDQNIQFWLEQFPQAWAETAGMGLAKQVPPQVIQLKASATPVSVRQYPLSKEAQEGIRPHVQRLIQQGILVPVQSPWNTPLLPVRKPGTNDYRPVQDLREVNKRVQDIHPTVPNPYNLLCALPPQRSWYTVLDLKDAFFCLRLHPTSQPLFAFEWRDPGTGRTGQLTWTRLPQGFKNSPTIFDEALHRDLANFRIQHPQVTLLQYVDDLLLAGATKQDCLEGTKALLLELSDLGYRASAKKAQICRREVTYLGYSLRDGQRWLTEARKKTVVQIPAPTTAKQVREFLGTAGFCRLWIPGFATLAAPLYPLTKEKGEFSWAPEHQKAFDAIKKALLSAPALALPDVTKPFTLYVDERKGVARGVLTQTLGPWRRPVAYLSKKLDPVASGWPVCLKAIAAVAILVKDADKLTLGQNITVIAPHALENIVRQPPDRWMTNARMTHYQSLLLTERVTFAPPAALNPATLLPEETDEPVTHDCHQLLIEETGVRKDLTDIPLTGEVLTWFTDGSSYVVEGKRMAGAAVVDGTRTIWASSLPEGTSAQKAELMALTQALRLAEGKSINIYTDSRYAFATAHVHGAIYKQRGLLTSAGREIKNKEEILSLLEALHLPKRLAIIHCPGHQKAKDPISRGNQMADRVAKQAAQGVNLLAGKRTADGSEFEKRTADGSEFESPKKKAKVE

SEQ ID NO: 7625 - protein, 2096 aa, synthetic construct
MPAAKRVKLDGGDKKYSIGLDIGTNSVGWAVITDEYKVPSKKFKVLGNTDRHSIKKNLIGALLFDSGETAEATRLKRTARRRYTRRKNRICYLQEIFSNEMAKVDDSFFHRLEESFLVEEDKKHERHPIFGNIVDEVAYHEKYPTIYHLRKKLVDSTDKADLRLIYLALAHMIKFRGHFLIEGDLNPDNSDVDKLFIQLVQTYNQLFEENPINASGVDAKAILSARLSKSRRLENLIAQLPGEKKNGLFGNLIALSLGLTPNFKSNFDLAEDAKLQLSKDTYDDDLDNLLAQIGDQYADLFLAAKNLSDAILLSDILRVNTEITKAPLSASMIKRYDEHHQDLTLLKALVRQQLPEKYKEIFFDQSKNGYAGYIDGGASQEEFYKFIKPILEKMDGTEELLVKLNREDLLRKQRTFDNGSIPHQIHLGELHAILRRQEDFYPFLKDNREKIEKILTFRIPYYVGPLARGNSRFAWMTRKSEETITPWNFEEVVDKGASAQSFIERMTNFDKNLPNEKVLPKHSLLYEYFTVYNELTKVKYVTEGMRKPAFLSGEQKKAIVDLLFKTNRKVTVKQLKEDYFKKIECFDSVEISGVEDRFNASLGTYHDLLKIIKDKDFLDNEENEDILEDIVLTLTLFEDREMIEERLKTYAHLFDDKVMKQLKRRRYTGWGRLSRKLINGIRDKQSGKTILDFLKSDGFANRNFMQLIHDDSLTFKEDIQKAQVSGQGDSLHEHIANLAGSPAIKKGILQTVKVVDELVKVMGRHKPENIVIEMARENQTTQKGQKNSRERMKRIEEGIKELGSQILKEHPVENTQLQNEKLYLYYLQNGRDMYVDQELDINRLSDYDVDHIVPQSFLKDDSIDNKVLTRSDKARGKSDNVPSEEVVKKMKNYWRQLLNAKLITQRKFDNLTKAERGGLSELDKAGFIKRQLVETRQITKHVAQILDSRMNTKYDENDKLIREVKVITLKSKLVSDFRKDFQFYKVREINNYHHAHDAYLNAVVGTALIKKYPKLESEFVYGDYKVYDVRKMIAKSEQEIGKATAKYFFYSNIMNFFKTEITLANGEIRKRPLIETNGETGEIVWDKGRDFATVRKVLSMPQVNIVKKTEVQTGGFSKESILPKRNSDKLIARKKDWDPKKYGGFDSPTVAYSVLVVAKVEKGKSKKLKSVKELLGITIMERSSFEKNPIDFLEAKGYKEVKKDLIIKLPKYSLFELENGRKRMLASAGELQKGNELALPSKYVNFLYLASHYEKLKGSPEDNEQKQLFVEQHKHYLDEIIEQISEFSKRVILADANLDKVLSAYNKHRDKPIREQAENIIHLFTLTNLGAPAAFKYFDTTIDRKRYTSTKEVLDATLIHQSITGLYETRIDLSQLGGDGGEAAAKPAPGSSGGTLNIEDEYRLHETSKEPDVPLGSTWLSDFPQAWAETGGMGLAVRQAPLIIPLKATSTPVSIKQYPMSQEARLGIKPHIQRLLDQGILVPCQSPWNTPLLPVKKPGTNDYRPVQDLREVNKRVEDIHPTVPNPYNLLSGLPPSHQWYTVLDLKDAFFCLRLHPTSQPLFAFEWRDPEMGISGQLTWTRLPQGFKNSPTLFNEALHRDLADFRIQHPDLILLQYVDDLLLAATSEQDCQRGTRALLQTLGNLGYRASAKKAQICQKQVKYLGYLLKEGQRWLTEARKETVMGQPTPKTPRQLREFLGTAGFCRLWIPGFAEMAAPLYPLTKPGTLFNWGPDQQKAYQEIKQALLTAPALGLPDLTKPFELFVDEKQGYAKGVLTQKLGPWRRPVAYLSKKLDPVAAGWPPCLRMVAAIAVLTKDAGKLTMGQPLVILAPHAVEALVKQPPDRWLSNARMTHYQAMLLDTDRVQFGPVVALNPATLLPLPEKEAPHDCLEILAETHGTRPDLTDQPIPDADYTWYTDGSSFLQEGQRRAGAAVTTETEVIWARALPAGTSAQRAELIALTQALKMAEGKKLNVYTDSRYAFATAHVHGEIYRRRGWLTSEGREIKNKNEILALLKALFLPKRLSIIHCPGHQKGNSAEARGNRMADQAAREAAMKAVLETSTLLAGKRTADGSEFEKRTADGSEFESPKKKAKVE

SEQ ID NO: 7626 - protein, 2098 aa, synthetic construct
MPAAKRVKLDGGDKKYSIGLDIGTNSVGWAVITDEYKVPSKKFKVLGNTDRHSIKKNLIGALLFDSGETAEATRLKRTARRRYTRRKNRICYLQEIFSNEMAKVDDSFFHRLEESFLVEEDKKHERHPIFGNIVDEVAYHEKYPTIYHLRKKLVDSTDKADLRLIYLALAHMIKFRGHFLIEGDLNPDNSDVDKLFIQLVQTYNQLFEENPINASGVDAKAILSARLSKSRRLENLIAQLPGEKKNGLFGNLIALSLGLTPNFKSNFDLAEDAKLQLSKDTYDDDLDNLLAQIGDQYADLFLAAKNLSDAILLSDILRVNTEITKAPLSASMIKRYDEHHQDLTLLKALVRQQLPEKYKEIFFDQSKNGYAGYIDGGASQEEFYKFIKPILEKMDGTEELLVKLNREDLLRKQRTFDNGSIPHQIHLGELHAILRRQEDFYPFLKDNREKIEKILTFRIPYYVGPLARGNSRFAWMTRKSEETITPWNFEEVVDKGASAQSFIERMTNFDKNLPNEKVLPKHSLLYEYFTVYNELTKVKYVTEGMRKPAFLSGEQKKAIVDLLFKTNRKVTVKQLKEDYFKKIECFDSVEISGVEDRFNASLGTYHDLLKIIKDKDFLDNEENEDILEDIVLTLTLFEDREMIEERLKTYAHLFDDKVMKQLKRRRYTGWGRLSRKLINGIRDKQSGKTILDFLKSDGFANRNFMQLIHDDSLTFKEDIQKAQVSGQGDSLHEHIANLAGSPAIKKGILQTVKVVDELVKVMGRHKPENIVIEMARENQTTQKGQKNSRERMKRIEEGIKELGSQILKEHPVENTQLQNEKLYLYYLQNGRDMYVDQELDINRLSDYDVDHIVPQSFLKDDSIDNKVLTRSDKARGKSDNVPSEEVVKKMKNYWRQLLNAKLITQRKFDNLTKAERGGLSELDKAGFIKRQLVETRQITKHVAQILDSRMNTKYDENDKLIREVKVITLKSKLVSDFRKDFQFYKVREINNYHHAHDAYLNAVVGTALIKKYPKLESEFVYGDYKVYDVRKMIAKSEQEIGKATAKYFFYSNIMNFFKTEITLANGEIRKRPLIETNGETGEIVWDKGRDFATVRKVLSMPQVNIVKKTEVQTGGFSKESILPKRNSDKLIARKKDWDPKKYGGFDSPTVAYSVLVVAKVEKGKSKKLKSVKELLGITIMERSSFEKNPIDFLEAKGYKEVKKDLIIKLPKYSLFELENGRKRMLASAGELQKGNELALPSKYVNFLYLASHYEKLKGSPEDNEQKQLFVEQHKHYLDEIIEQISEFSKRVILADANLDKVLSAYNKHRDKPIREQAENIIHLFTLTNLGAPAAFKYFDTTIDRKRYTSTKEVLDATLIHQSITGLYETRIDLSQLGGDGGPAPGSSEAAAKGGTAPLEEEYRLFLEAPIQNVTLLEQWKREIPKVWAEINPPGLASTQAPIHVQLLSTALPVRVRQYPITLEAKRSLRETIRKFRAAGILRPVHSPWNTPLLPVRKSGTSEYRMVQDLREVNKRVETIHPTVPNPYTLLSLLPPDRIWYSVLDLKDAFFCIPLAPESQLIFAFEWADAEEGESGQLTWTRLPQGFKNSPTLFNEALNRDLQGFRLDHPSVSLLQYVDDLLIAADTQAACLSATRDLLMTLAELGYRVSGKKAQLCQEEVTYLGFKIHKGSRSLSNSRTQAILQIPVPKTKRQVREFLGTIGYCRLWIPGFAELAQPLYAATRPGNDPLVWGEKEEEAFQSLKLALTQPPALALPSLDKPFQLFVEETSGAAKGVLTQALGPWKRPVAYLSKRLDPVAAGWPRCLRAIAAAALLTREASKLTFGQDIEITSSHNLESLLRSPPDKWLTNARITQYQVLLLDPPRVRFKQTAALNPATLLPETDDTLPIHHCLDTLDSLTSTRPDLTDQPLAQAEATLFTDGSSYIRDGKRYAGAAVVTLDSVIWAEPLPIGTSAQKAELIALTKALEWSKDKSVNIYTDSRYAFATLHVHGMIYRERGWLTAGGKAIKNAPEILALLTAVWLPKRVAVMHCKGHQKDDAPTSTGNRRADEVAREVAIRPLSTQATISAGKRTADGSEFEKRTADGSEFESPKKKAKVE

SEQ ID NO: 7627 - protein, 2098 aa, synthetic construct
MPAAKRVKLDGGDKKYSIGLDIGTNSVGWAVITDEYKVPSKKFKVLGNTDRHSIKKNLIGALLFDSGETAEATRLKRTARRRYTRRKNRICYLQEIFSNEMAKVDDSFFHRLEESFLVEEDKKHERHPIFGNIVDEVAYHEKYPTIYHLRKKLVDSTDKADLRLIYLALAHMIKFRGHFLIEGDLNPDNSDVDKLFIQLVQTYNQLFEENPINASGVDAKAILSARLSKSRRLENLIAQLPGEKKNGLFGNLIALSLGLTPNFKSNFDLAEDAKLQLSKDTYDDDLDNLLAQIGDQYADLFLAAKNLSDAILLSDILRVNTEITKAPLSASMIKRYDEHHQDLTLLKALVRQQLPEKYKEIFFDQSKNGYAGYIDGGASQEEFYKFIKPILEKMDGTEELLVKLNREDLLRKQRTFDNGSIPHQIHLGELHAILRRQEDFYPFLKDNREKIEKILTFRIPYYVGPLARGNSRFAWMTRKSEETITPWNFEEVVDKGASAQSFIERMTNFDKNLPNEKVLPKHSLLYEYFTVYNELTKVKYVTEGMRKPAFLSGEQKKAIVDLLFKTNRKVTVKQLKEDYFKKIECFDSVEISGVEDRFNASLGTYHDLLKIIKDKDFLDNEENEDILEDIVLTLTLFEDREMIEERLKTYAHLFDDKVMKQLKRRRYTGWGRLSRKLINGIRDKQSGKTILDFLKSDGFANRNFMQLIHDDSLTFKEDIQKAQVSGQGDSLHEHIANLAGSPAIKKGILQTVKVVDELVKVMGRHKPENIVIEMARENQTTQKGQKNSRERMKRIEEGIKELGSQILKEHPVENTQLQNEKLYLYYLQNGRDMYVDQELDINRLSDYDVDHIVPQSFLKDDSIDNKVLTRSDKARGKSDNVPSEEVVKKMKNYWRQLLNAKLITQRKFDNLTKAERGGLSELDKAGFIKRQLVETRQITKHVAQILDSRMNTKYDENDKLIREVKVITLKSKLVSDFRKDFQFYKVREINNYHHAHDAYLNAVVGTALIKKYPKLESEFVYGDYKVYDVRKMIAKSEQEIGKATAKYFFYSNIMNFFKTEITLANGEIRKRPLIETNGETGEIVWDKGRDFATVRKVLSMPQVNIVKKTEVQTGGFSKESILPKRNSDKLIARKKDWDPKKYGGFDSPTVAYSVLVVAKVEKGKSKKLKSVKELLGITIMERSSFEKNPIDFLEAKGYKEVKKDLIIKLPKYSLFELENGRKRMLASAGELQKGNELALPSKYVNFLYLASHYEKLKGSPEDNEQKQLFVEQHKHYLDEIIEQISEFSKRVILADANLDKVLSAYNKHRDKPIREQAENIIHLFTLTNLGAPAAFKYFDTTIDRKRYTSTKEVLDATLIHQSITGLYETRIDLSQLGGDGGPAPGSSEAAAKGGTAPLEEEYRLFLEAPIQNVTLLEQWKREIPKVWAEINPPGLASTQAPIHVQLLSTALPVRVRQYPITLEAKRSLRETIRKFRAAGILRPVHSPWNTPLLPVRKSGTSEYRMVQDLREVNKRVETIHPTVPNPYTLLSLLPPDRIWYSVLDLKDAFFCIPLAPESQLIFAFEWADAEEGESGQLTWTRLPQGFKNSPTLFNEALNRDLQGFRLDHPSVSLLQYVDDLLIAADTQAACLSATRDLLMTLAELGYRVSGKKAQLCQEEVTYLGFKIHKGSRSLSNSRTQAILQIPVPKTKRQVREFLGKIGYCRLFIPGFAELAQPLYAATRPGNDPLVWGEKEEEAFQSLKLALTQPPALALPSLDKPFQLFVEETSGAAKGVLTQALGPWKRPVAYLSKRLDPVAAGWPRCLRAIAAAALLTREASKLTFGQDIEITSSHNLESLLRSPPDKWLTNARITQYQVLLLDPPRVRFKQTAALNPATLLPETDDTLPIHHCLDTLDSLTSTRPDLTDQPLAQAEATLFTDGSSYIRDGKRYAGAAVVTLDSVIWAEPLPIGTSAQKAELIALTKALEWSKDKSVNIYTDSRYAFATLHVHGMIYRERGWLTAGGKAIKNAPEILALLTAVWLPKRVAVMHCKGHQKDDAPTSTGNRRADEVAREVAIRPLSTQATISAGKRTADGSEFEKRTADGSEFESPKKKAKVE

SEQ ID NO: 7628 - protein, 2087 aa, synthetic construct
MPAAKRVKLDGGDKKYSIGLDIGTNSVGWAVITDEYKVPSKKFKVLGNTDRHSIKKNLIGALLFDSGETAEATRLKRTARRRYTRRKNRICYLQEIFSNEMAKVDDSFFHRLEESFLVEEDKKHERHPIFGNIVDEVAYHEKYPTIYHLRKKLVDSTDKADLRLIYLALAHMIKFRGHFLIEGDLNPDNSDVDKLFIQLVQTYNQLFEENPINASGVDAKAILSARLSKSRRLENLIAQLPGEKKNGLFGNLIALSLGLTPNFKSNFDLAEDAKLQLSKDTYDDDLDNLLAQIGDQYADLFLAAKNLSDAILLSDILRVNTEITKAPLSASMIKRYDEHHQDLTLLKALVRQQLPEKYKEIFFDQSKNGYAGYIDGGASQEEFYKFIKPILEKMDGTEELLVKLNREDLLRKQRTFDNGSIPHQIHLGELHAILRRQEDFYPFLKDNREKIEKILTFRIPYYVGPLARGNSRFAWMTRKSEETITPWNFEEVVDKGASAQSFIERMTNFDKNLPNEKVLPKHSLLYEYFTVYNELTKVKYVTEGMRKPAFLSGEQKKAIVDLLFKTNRKVTVKQLKEDYFKKIECFDSVEISGVEDRFNASLGTYHDLLKIIKDKDFLDNEENEDILEDIVLTLTLFEDREMIEERLKTYAHLFDDKVMKQLKRRRYTGWGRLSRKLINGIRDKQSGKTILDFLKSDGFANRNFMQLIHDDSLTFKEDIQKAQVSGQGDSLHEHIANLAGSPAIKKGILQTVKVVDELVKVMGRHKPENIVIEMARENQTTQKGQKNSRERMKRIEEGIKELGSQILKEHPVENTQLQNEKLYLYYLQNGRDMYVDQELDINRLSDYDVDHIVPQSFLKDDSIDNKVLTRSDKARGKSDNVPSEEVVKKMKNYWRQLLNAKLITQRKFDNLTKAERGGLSELDKAGFIKRQLVETRQITKHVAQILDSRMNTKYDENDKLIREVKVITLKSKLVSDFRKDFQFYKVREINNYHHAHDAYLNAVVGTALIKKYPKLESEFVYGDYKVYDVRKMIAKSEQEIGKATAKYFFYSNIMNFFKTEITLANGEIRKRPLIETNGETGEIVWDKGRDFATVRKVLSMPQVNIVKKTEVQTGGFSKESILPKRNSDKLIARKKDWDPKKYGGFDSPTVAYSVLVVAKVEKGKSKKLKSVKELLGITIMERSSFEKNPIDFLEAKGYKEVKKDLIIKLPKYSLFELENGRKRMLASAGELQKGNELALPSKYVNFLYLASHYEKLKGSPEDNEQKQLFVEQHKHYLDEIIEQISEFSKRVILADANLDKVLSAYNKHRDKPIREQAENIIHLFTLTNLGAPAAFKYFDTTIDRKRYTSTKEVLDATLIHQSITGLYETRIDLSQLGGDGGPAPGSSEAAAKGGVPWILKKPLELTIKLDLEEQQGTLLNNSILSKKGKEELKQLFEKYSALWQSWENQVGHRRIRPHKIATGTVKPTPQKQYHINPKAKPDIQIVINDLLKQGVLIQKESTMNTPVYPVPKPNGRWRMVLDYRAVNKVTPLIAVQNQHSYGILGSLFKGRYKTTIDLSNGFWAHPIVPEDYWITAFTWQGKQYCWTVLPQGFLNSPGLFTGDVVDLLQGIPNVEVYVDDVYISHDSEKEHLEYLDILFNRLKEAGYIISLKKSNIANSIVDFLGFQITNEGRGLTDTFKEKLENITAPTTLKQLQSILGLLNFARNFIPDFTELIAPLYALIPKSTKNYVPWQIEHSTTLETLITKLNGAEYLQGRKGDKTLIMKVNASYTTGYIRYYNEGEKKPISYVSIVFSKTELKFTELEKLLTTVHKGLLKALDLSMGQNIHVYSPIVSMQNIQKTPQTAKKALASRWLSWLSYLEDPRIRFFYDPQMPALKDLPAVDTGKDNKKHPSNFQHIFYTDGSAITSPTKEGHLNAGMGIVYFINKDGNLQKQQEWSISLGNHTAQFAEIAAFEFALKKCLPLGGNILVVTDSNYVAKAYNEELDVWASNGFVNNRKKPLKHISKWKSVADLKRLRPDVVVTHEPGHQKLDSSPHAYGNNLADQLATQASFKVHAGKRTADGSEFEKRTADGSEFESPKKKAKVE

SEQ ID NO: 7629 - protein, 2095 aa, synthetic construct
MPAAKRVKLDGGDKKYSIGLDIGTNSVGWAVITDEYKVPSKKFKVLGNTDRHSIKKNLIGALLFDSGETAEATRLKRTARRRYTRRKNRICYLQEIFSNEMAKVDDSFFHRLEESFLVEEDKKHERHPIFGNIVDEVAYHEKYPTIYHLRKKLVDSTDKADLRLIYLALAHMIKFRGHFLIEGDLNPDNSDVDKLFIQLVQTYNQLFEENPINASGVDAKAILSARLSKSRRLENLIAQLPGEKKNGLFGNLIALSLGLTPNFKSNFDLAEDAKLQLSKDTYDDDLDNLLAQIGDQYADLFLAAKNLSDAILLSDILRVNTEITKAPLSASMIKRYDEHHQDLTLLKALVRQQLPEKYKEIFFDQSKNGYAGYIDGGASQEEFYKFIKPILEKMDGTEELLVKLNREDLLRKQRTFDNGSIPHQIHLGELHAILRRQEDFYPFLKDNREKIEKILTFRIPYYVGPLARGNSRFAWMTRKSEETITPWNFEEVVDKGASAQSFIERMTNFDKNLPNEKVLPKHSLLYEYFTVYNELTKVKYVTEGMRKPAFLSGEQKKAIVDLLFKTNRKVTVKQLKEDYFKKIECFDSVEISGVEDRFNASLGTYHDLLKIIKDKDFLDNEENEDILEDIVLTLTLFEDREMIEERLKTYAHLFDDKVMKQLKRRRYTGWGRLSRKLINGIRDKQSGKTILDFLKSDGFANRNFMQLIHDDSLTFKEDIQKAQVSGQGDSLHEHIANLAGSPAIKKGILQTVKVVDELVKVMGRHKPENIVIEMARENQTTQKGQKNSRERMKRIEEGIKELGSQILKEHPVENTQLQNEKLYLYYLQNGRDMYVDQELDINRLSDYDVDHIVPQSFLKDDSIDNKVLTRSDKARGKSDNVPSEEVVKKMKNYWRQLLNAKLITQRKFDNLTKAERGGLSELDKAGFIKRQLVETRQITKHVAQILDSRMNTKYDENDKLIREVKVITLKSKLVSDFRKDFQFYKVREINNYHHAHDAYLNAVVGTALIKKYPKLESEFVYGDYKVYDVRKMIAKSEQEIGKATAKYFFYSNIMNFFKTEITLANGEIRKRPLIETNGETGEIVWDKGRDFATVRKVLSMPQVNIVKKTEVQTGGFSKESILPKRNSDKLIARKKDWDPKKYGGFDSPTVAYSVLVVAKVEKGKSKKLKSVKELLGITIMERSSFEKNPIDFLEAKGYKEVKKDLIIKLPKYSLFELENGRKRMLASAGELQKGNELALPSKYVNFLYLASHYEKLKGSPEDNEQKQLFVEQHKHYLDEIIEQISEFSKRVILADANLDKVLSAYNKHRDKPIREQAENIIHLFTLTNLGAPAAFKYFDTTIDRKRYTSTKEVLDATLIHQSITGLYETRIDLSQLGGDGGPAPGSSEAAAKGGTLQLEEEYRLFEPESTQKQEMDIWLKNFPQAWAETGGMGTAHCQAPVLIQLKATATPISIRQYPMPHEAYQGIKPHIRRMLDQGILKPCQSPWNTPLLPVKKPGTEDYRPVQDLREVNKRVEDIHPTVPNPYNLLSTLPPSHPWYTVLDLKDAFFCLRLHSESQLLFAFEWRDPEIGLSGQLTWTRLPQGFKNSPTLFNEALHSDLADFRVRYPALVLLQYVDDLLLAAATRTECLEGTKALLETLGNKGYRASAKKAQICLQEVTYLGYSLKDGQRWLTKARKEAILSIPVPKNSRQVREFLGTAGYCRLWIPGFAELAAPLYPLTRPGTLFQWGTEQQLAFEDIKKALLSSPALGLPDITKPFELFIDENSGFAKGVLVQKLGPWKRPVAYLSKKLDTVASGWPPCLRMVAAIAILVKDAGKLTLGQPLTILTSHPVEALVRQPPNKWLSNARMTHYQAMLLDAERVHFGPTVSLNPATLLPLPSGGNHHDCLQILAETHGTRPDLTDQPLPDADLTWYTDGSSFIRNGEREAGAAVTTESEVIWAAPLPPGTSAQRAELIALTQALKMAEGKKLTVYTDSRYAFATTHVHGEIYRRRGWLTSEGKEIKNKNEILALLEALFLPKRLSIIHCPGHQKGDSPQAKGNRLADDTAKKAATETHSSLTVLPAGKRTADGSEFEKRTADGSEFESPKKKAKVE

SEQ ID NO: 7630 - protein, 2094 aa, synthetic construct
MPAAKRVKLDGGDKKYSIGLDIGTNSVGWAVITDEYKVPSKKFKVLGNTDRHSIKKNLIGALLFDSGETAEATRLKRTARRRYTRRKNRICYLQEIFSNEMAKVDDSFFHRLEESFLVEEDKKHERHPIFGNIVDEVAYHEKYPTIYHLRKKLVDSTDKADLRLIYLALAHMIKFRGHFLIEGDLNPDNSDVDKLFIQLVQTYNQLFEENPINASGVDAKAILSARLSKSRRLENLIAQLPGEKKNGLFGNLIALSLGLTPNFKSNFDLAEDAKLQLSKDTYDDDLDNLLAQIGDQYADLFLAAKNLSDAILLSDILRVNTEITKAPLSASMIKRYDEHHQDLTLLKALVRQQLPEKYKEIFFDQSKNGYAGYIDGGASQEEFYKFIKPILEKMDGTEELLVKLNREDLLRKQRTFDNGSIPHQIHLGELHAILRRQEDFYPFLKDNREKIEKILTFRIPYYVGPLARGNSRFAWMTRKSEETITPWNFEEVVDKGASAQSFIERMTNFDKNLPNEKVLPKHSLLYEYFTVYNELTKVKYVTEGMRKPAFLSGEQKKAIVDLLFKTNRKVTVKQLKEDYFKKIECFDSVEISGVEDRFNASLGTYHDLLKIIKDKDFLDNEENEDILEDIVLTLTLFEDREMIEERLKTYAHLFDDKVMKQLKRRRYTGWGRLSRKLINGIRDKQSGKTILDFLKSDGFANRNFMQLIHDDSLTFKEDIQKAQVSGQGDSLHEHIANLAGSPAIKKGILQTVKVVDELVKVMGRHKPENIVIEMARENQTTQKGQKNSRERMKRIEEGIKELGSQILKEHPVENTQLQNEKLYLYYLQNGRDMYVDQELDINRLSDYDVDHIVPQSFLKDDSIDNKVLTRSDKARGKSDNVPSEEVVKKMKNYWRQLLNAKLITQRKFDNLTKAERGGLSELDKAGFIKRQLVETRQITKHVAQILDSRMNTKYDENDKLIREVKVITLKSKLVSDFRKDFQFYKVREINNYHHAHDAYLNAVVGTALIKKYPKLESEFVYGDYKVYDVRKMIAKSEQEIGKATAKYFFYSNIMNFFKTEITLANGEIRKRPLIETNGETGEIVWDKGRDFATVRKVLSMPQVNIVKKTEVQTGGFSKESILPKRNSDKLIARKKDWDPKKYGGFDSPTVAYSVLVVAKVEKGKSKKLKSVKELLGITIMERSSFEKNPIDFLEAKGYKEVKKDLIIKLPKYSLFELENGRKRMLASAGELQKGNELALPSKYVNFLYLASHYEKLKGSPEDNEQKQLFVEQHKHYLDEIIEQISEFSKRVILADANLDKVLSAYNKHRDKPIREQAENIIHLFTLTNLGAPAAFKYFDTTIDRKRYTSTKEVLDATLIHQSITGLYETRIDLSQLGGDGGPAPGSSEAAAKGGVLNLEEEYRLHEKPVPSSIDPSWLQLFPTVWAERAGMGLANQVPPVVVELRSGASPVAVRQYPMSKEAREGIRPHIQKFLDLGVLVPCRSPWNTPLLPVKKPGTNDYRPVQDLREINKRVQDIHPTVPNPYNLLSSLPPSYTWYSVLDLKDAFFCLRLHPNSQPLFAFEWKDPEKGNTGQLTWTRLPQGFKNSPTLFNEALHRDLAPFRALNPQVVLLQYVDDLLVAAPTYEDCKKGTQKLLQELSKLGYRVSAKKAQLCQREVTYLGYLLKEGKRWLTPARKATVMKIPVPTTPRQVREFLGKAGFCRLFIPGFASLAAPLYPLTKPSIPFIWTEEHQQAFDHIKKALLSAPALALPDLTKPFTLYIDERAGVARGVLTQTLGPWRRPVAYLSKKLDPVASGWPTCLKAVAAVALLLKDADKLTLGQNVTVIASHSLESIVRQPPDRWMTNARMTHYQSLLLNERVSFAPPAVLNPATLLPVESEATPVHRCSEILAEETGTRRDLEDQPLPGVPTWYTDGSSFITEGKRRAGAPIVDGKRTVWASSLPEGTSAQKAELVALTQALRLAEGKNINIYTDSRYAFATAHIHGAIYKQRGWLTSAGKDIKNKEEILALLEAIHLPRRVAIIHCPGHQRGSNPVATGNRRADEAAKQAALSTRVLAGTTKPAGKRTADGSEFEKRTADGSEFESPKKKAKVE

SEQ ID NO: 7631 - protein, 2218 aa, synthetic construct
MPAAKRVKLDGGDKKYSIGLDIGTNSVGWAVITDEYKVPSKKFKVLGNTDRHSIKKNLIGALLFDSGETAEATRLKRTARRRYTRRKNRICYLQEIFSNEMAKVDDSFFHRLEESFLVEEDKKHERHPIFGNIVDEVAYHEKYPTIYHLRKKLVDSTDKADLRLIYLALAHMIKFRGHFLIEGDLNPDNSDVDKLFIQLVQTYNQLFEENPINASGVDAKAILSARLSKSRRLENLIAQLPGEKKNGLFGNLIALSLGLTPNFKSNFDLAEDAKLQLSKDTYDDDLDNLLAQIGDQYADLFLAAKNLSDAILLSDILRVNTEITKAPLSASMIKRYDEHHQDLTLLKALVRQQLPEKYKEIFFDQSKNGYAGYIDGGASQEEFYKFIKPILEKMDGTEELLVKLNREDLLRKQRTFDNGSIPHQIHLGELHAILRRQEDFYPFLKDNREKIEKILTFRIPYYVGPLARGNSRFAWMTRKSEETITPWNFEEVVDKGASAQSFIERMTNFDKNLPNEKVLPKHSLLYEYFTVYNELTKVKYVTEGMRKPAFLSGEQKKAIVDLLFKTNRKVTVKQLKEDYFKKIECFDSVEISGVEDRFNASLGTYHDLLKIIKDKDFLDNEENEDILEDIVLTLTLFEDREMIEERLKTYAHLFDDKVMKQLKRRRYTGWGRLSRKLINGIRDKQSGKTILDFLKSDGFANRNFMQLIHDDSLTFKEDIQKAQVSGQGDSLHEHIANLAGSPAIKKGILQTVKVVDELVKVMGRHKPENIVIEMARENQTTQKGQKNSRERMKRIEEGIKELGSQILKEHPVENTQLQNEKLYLYYLQNGRDMYVDQELDINRLSDYDVDHIVPQSFLKDDSIDNKVLTRSDKARGKSDNVPSEEVVKKMKNYWRQLLNAKLITQRKFDNLTKAERGGLSELDKAGFIKRQLVETRQITKHVAQILDSRMNTKYDENDKLIREVKVITLKSKLVSDFRKDFQFYKVREINNYHHAHDAYLNAVVGTALIKKYPKLESEFVYGDYKVYDVRKMIAKSEQEIGKATAKYFFYSNIMNFFKTEITLANGEIRKRPLIETNGETGEIVWDKGRDFATVRKVLSMPQVNIVKKTEVQTGGFSKESILPKRNSDKLIARKKDWDPKKYGGFDSPTVAYSVLVVAKVEKGKSKKLKSVKELLGITIMERSSFEKNPIDFLEAKGYKEVKKDLIIKLPKYSLFELENGRKRMLASAGELQKGNELALPSKYVNFLYLASHYEKLKGSPEDNEQKQLFVEQHKHYLDEIIEQISEFSKRVILADANLDKVLSAYNKHRDKPIREQAENIIHLFTLTNLGAPAAFKYFDTTIDRKRYTSTKEVLDATLIHQSITGLYETRIDLSQLGGDGGPAPGSSEAAAKGGTLGDQGSRGSDPLPEPRVTLTVEGIPTEFLVNTGAEHSVLTKPMGKMGSKRTVVAGATGSKVYPWTTKRLLKIGQKQVTHSFLVIPECPAPLLGRDLLTKLKAQIQFSTEGPQVTWEDRPAMCLVLNLEEEYRLHEKPVPPSIDPSWLQLFPMVWAEKAGMGLANQVPPVVVELKSDASPVAVRQYPMSKEAREGIRPHIQRFLDLGILVPCQSPWNTPLLPVKKPGTNDYRPVQDLREVNKRVQDIHPTVPNPYNLLSSLPPSHTWYSVLDLKDAFFCLKLHPNSQPLFAFEWRDPEKGNTGQLTWTRLPQGFKNSPTLFDEALHRDLASFRALNPQVVMLQYVDDLLVAAPTYRDCKEGTRRLLQELSKLGYRVSAKKAQLCREEVTYLGYLLKGGKRWLTPARKATVMKIPTPTTPRQVREFLGTAGFCRLWIPGFASLAAPLYPLTREKVPFTWTEAHQEAFGRIKEALLSAPALALPDLTKPFALYVDEKEGVARGVLTQTLGPWRRPVAYLSKKLDPVASGWPTCLKAIAAVALLLKDADKLTLGQNVLVIAPHNLESIVRQPPDRWMTNARMTHYQSLLLNERVSFAPPAILNPATLLPVESDDTPIHICSEILAEETGTRPDLRDQPLPGVPAWYTDGSSFIMDGRRQAGAAIVDNKRTVWASNLPEGTSAQKAELIALTQALRLAEGKSINIYTDSRYAFATAHVHGAIYKQRGLLTSAGKDIKNKEEILALLEAIHLPKRVAIIHCPGHQRGTDPVATGNRKADEAAKQAAQSTRILTETTKNAGKRTADGSEFEKRTADGSEFESPKKKAKVE

SEQ ID NO: 7632 - protein, 2127 aa, synthetic construct
MPAAKRVKLDGGDKKYSIGLDIGTNSVGWAVITDEYKVPSKKFKVLGNTDRHSIKKNLIGALLFDSGETAEATRLKRTARRRYTRRKNRICYLQEIFSNEMAKVDDSFFHRLEESFLVEEDKKHERHPIFGNIVDEVAYHEKYPTIYHLRKKLVDSTDKADLRLIYLALAHMIKFRGHFLIEGDLNPDNSDVDKLFIQLVQTYNQLFEENPINASGVDAKAILSARLSKSRRLENLIAQLPGEKKNGLFGNLIALSLGLTPNFKSNFDLAEDAKLQLSKDTYDDDLDNLLAQIGDQYADLFLAAKNLSDAILLSDILRVNTEITKAPLSASMIKRYDEHHQDLTLLKALVRQQLPEKYKEIFFDQSKNGYAGYIDGGASQEEFYKFIKPILEKMDGTEELLVKLNREDLLRKQRTFDNGSIPHQIHLGELHAILRRQEDFYPFLKDNREKIEKILTFRIPYYVGPLARGNSRFAWMTRKSEETITPWNFEEVVDKGASAQSFIERMTNFDKNLPNEKVLPKHSLLYEYFTVYNELTKVKYVTEGMRKPAFLSGEQKKAIVDLLFKTNRKVTVKQLKEDYFKKIECFDSVEISGVEDRFNASLGTYHDLLKIIKDKDFLDNEENEDILEDIVLTLTLFEDREMIEERLKTYAHLFDDKVMKQLKRRRYTGWGRLSRKLINGIRDKQSGKTILDFLKSDGFANRNFMQLIHDDSLTFKEDIQKAQVSGQGDSLHEHIANLAGSPAIKKGILQTVKVVDELVKVMGRHKPENIVIEMARENQTTQKGQKNSRERMKRIEEGIKELGSQILKEHPVENTQLQNEKLYLYYLQNGRDMYVDQELDINRLSDYDVDHIVPQSFLKDDSIDNKVLTRSDKARGKSDNVPSEEVVKKMKNYWRQLLNAKLITQRKFDNLTKAERGGLSELDKAGFIKRQLVETRQITKHVAQILDSRMNTKYDENDKLIREVKVITLKSKLVSDFRKDFQFYKVREINNYHHAHDAYLNAVVGTALIKKYPKLESEFVYGDYKVYDVRKMIAKSEQEIGKATAKYFFYSNIMNFFKTEITLANGEIRKRPLIETNGETGEIVWDKGRDFATVRKVLSMPQVNIVKKTEVQTGGFSKESILPKRNSDKLIARKKDWDPKKYGGFDSPTVAYSVLVVAKVEKGKSKKLKSVKELLGITIMERSSFEKNPIDFLEAKGYKEVKKDLIIKLPKYSLFELENGRKRMLASAGELQKGNELALPSKYVNFLYLASHYEKLKGSPEDNEQKQLFVEQHKHYLDEIIEQISEFSKRVILADANLDKVLSAYNKHRDKPIREQAENIIHLFTLTNLGAPAAFKYFDTTIDRKRYTSTKEVLDATLIHQSITGLYETRIDLSQLGGDGGPAPGSSEAAAKGGLLGRDLLTKLKAQIQFSTEGPQVTWEDRPAMCLVLNLEEEYRLHEKPVPPSIDPSWLQLFPMVWAEKAGMGLANQVPPVVVELKSDASPVAVRQYPMSKEAREGIRPHIQRFLDLGILVPCQSPWNTPLLPVKKPGTNDYRPVQDLREVNKRVQDIHPTVPNPYNLLSSLPPSHTWYSVLDLKDAFFCLKLHPNSQPLFAFEWRDPEKGNTGQLTWTRLPQGFKNSPTLFNEALHRDLASFRALNPQVVMLQYVDDLLVAAPTYRDCKEGTRRLLQELSKLGYRVSAKKAQLCREEVTYLGYLLKGGKRWLTPARKATVMKIPTPTTPRQVREFLGTAGFCRLWIPGFASLAAPLYPLTRPKVPFTWTEAHQEAFGRIKEALLSAPALALPDLTKPFALYVDEKEGVARGVLTQTLGPWRRPVAYLSKKLDPVASGWPTCLKAIAAVALLLKDADKLTLGQNVLVIAPHNLESIVRQPPDRWMTNARMTHYQSLLLNERVSFAPPAILNPATLLPVESDDTPIHICSEILAEETGTRPDLRDQPLPGVPAWYTDGSSFIMDGRRQAGAAIVDNKRTVWASNLPEGTSAQKAELIALTQALRLAEGKSINIYTDSRYAFATAHVHGAIYKQRGWLTSAGKDIKNKEEILALLEAIHLPKRVAIIHCPGHQRGTDPVATGNRKADEAAKQAAQSTRILTETTKNAGKRTADGSEFEKRTADGSEFESPKKKAKVE

SEQ ID NO: 7633 - protein, 2127 aa, synthetic construct
MPAAKRVKLDGGDKKYSIGLDIGTNSVGWAVITDEYKVPSKKFKVLGNTDRHSIKKNLIGALLFDSGETAEATRLKRTARRRYTRRKNRICYLQEIFSNEMAKVDDSFFHRLEESFLVEEDKKHERHPIFGNIVDEVAYHEKYPTIYHLRKKLVDSTDKADLRLIYLALAHMIKFRGHFLIEGDLNPDNSDVDKLFIQLVQTYNQLFEENPINASGVDAKAILSARLSKSRRLENLIAQLPGEKKNGLFGNLIALSLGLTPNFKSNFDLAEDAKLQLSKDTYDDDLDNLLAQIGDQYADLFLAAKNLSDAILLSDILRVNTEITKAPLSASMIKRYDEHHQDLTLLKALVRQQLPEKYKEIFFDQSKNGYAGYIDGGASQEEFYKFIKPILEKMDGTEELLVKLNREDLLRKQRTFDNGSIPHQIHLGELHAILRRQEDFYPFLKDNREKIEKILTFRIPYYVGPLARGNSRFAWMTRKSEETITPWNFEEVVDKGASAQSFIERMTNFDKNLPNEKVLPKHSLLYEYFTVYNELTKVKYVTEGMRKPAFLSGEQKKAIVDLLFKTNRKVTVKQLKEDYFKKIECFDSVEISGVEDRFNASLGTYHDLLKIIKDKDFLDNEENEDILEDIVLTLTLFEDREMIEERLKTYAHLFDDKVMKQLKRRRYTGWGRLSRKLINGIRDKQSGKTILDFLKSDGFANRNFMQLIHDDSLTFKEDIQKAQVSGQGDSLHEHIANLAGSPAIKKGILQTVKVVDELVKVMGRHKPENIVIEMARENQTTQKGQKNSRERMKRIEEGIKELGSQILKEHPVENTQLQNEKLYLYYLQNGRDMYVDQELDINRLSDYDVDHIVPQSFLKDDSIDNKVLTRSDKARGKSDNVPSEEVVKKMKNYWRQLLNAKLITQRKFDNLTKAERGGLSELDKAGFIKRQLVETRQITKHVAQILDSRMNTKYDENDKLIREVKVITLKSKLVSDFRKDFQFYKVREINNYHHAHDAYLNAVVGTALIKKYPKLESEFVYGDYKVYDVRKMIAKSEQEIGKATAKYFFYSNIMNFFKTEITLANGEIRKRPLIETNGETGEIVWDKGRDFATVRKVLSMPQVNIVKKTEVQTGGFSKESILPKRNSDKLIARKKDWDPKKYGGFDSPTVAYSVLVVAKVEKGKSKKLKSVKELLGITIMERSSFEKNPIDFLEAKGYKEVKKDLIIKLPKYSLFELENGRKRMLASAGELQKGNELALPSKYVNFLYLASHYEKLKGSPEDNEQKQLFVEQHKHYLDEIIEQISEFSKRVILADANLDKVLSAYNKHRDKPIREQAENIIHLFTLTNLGAPAAFKYFDTTIDRKRYTSTKEVLDATLIHQSITGLYETRIDLSQLGGDGGPAPGSSEAAAKGGLLGRDLLTKLKAQIQFSTEGPQVTWEDRPAMCLVLNLEEEYRLHEKPVPPSIDPSWLQLFPMVWAEKAGMGLANQVPPVVVELKSDASPVAVRQYPMSKEAREGIRPHIQRFLDLGILVPCQSPWNTPLLPVKKPGTNDYRPVQDLREVNKRVQDIHPTVPNPYNLLSSLPPSHTWYSVLDLKDAFFCLKLHPNSQPLFAFEWRDPEKGNTGQLTWTRLPQGFKNSPTLFNEALHRDLASFRALNPQVVMLQYVDDLLVAAPTYRDCKEGTRRLLQELSKLGYRVSAKKAQLCREEVTYLGYLLKGGKRWLTPARKATVMKIPTPTTPRQVREFLGKAGFCRLFIPGFASLAAPLYPLTRPKVPFTWTEAHQEAFGRIKEALLSAPALALPDLTKPFALYVDEKEGVARGVLTQTLGPWRRPVAYLSKKLDPVASGWPTCLKAIAAVALLLKDADKLTLGQNVLVIAPHNLESIVRQPPDRWMTNARMTHYQSLLLNERVSFAPPAILNPATLLPVESDDTPIHICSEILAEETGTRPDLRDQPLPGVPAWYTDGSSFIMDGRRQAGAAIVDNKRTVWASNLPEGTSAQKAELIALTQALRLAEGKSINIYTDSRYAFATAHVHGAIYKQRGWLTSAGKDIKNKEEILALLEAIHLPKRVAIIHCPGHQRGTDPVATGNRKADEAAKQAAQSTRILTETTKNAGKRTADGSEFEKRTADGSEFESPKKKAKVE

SEQ ID NO: 7634 - protein, 2218 aa, synthetic construct
MPAAKRVKLDGGDKKYSIGLDIGTNSVGWAVITDEYKVPSKKFKVLGNTDRHSIKKNLIGALLFDSGETAEATRLKRTARRRYTRRKNRICYLQEIFSNEMAKVDDSFFHRLEESFLVEEDKKHERHPIFGNIVDEVAYHEKYPTIYHLRKKLVDSTDKADLRLIYLALAHMIKFRGHFLIEGDLNPDNSDVDKLFIQLVQTYNQLFEENPINASGVDAKAILSARLSKSRRLENLIAQLPGEKKNGLFGNLIALSLGLTPNFKSNFDLAEDAKLQLSKDTYDDDLDNLLAQIGDQYADLFLAAKNLSDAILLSDILRVNTEITKAPLSASMIKRYDEHHQDLTLLKALVRQQLPEKYKEIFFDQSKNGYAGYIDGGASQEEFYKFIKPILEKMDGTEELLVKLNREDLLRKQRTFDNGSIPHQIHLGELHAILRRQEDFYPFLKDNREKIEKILTFRIPYYVGPLARGNSRFAWMTRKSEETITPWNFEEVVDKGASAQSFIERMTNFDKNLPNEKVLPKHSLLYEYFTVYNELTKVKYVTEGMRKPAFLSGEQKKAIVDLLFKTNRKVTVKQLKEDYFKKIECFDSVEISGVEDRFNASLGTYHDLLKIIKDKDFLDNEENEDILEDIVLTLTLFEDREMIEERLKTYAHLFDDKVMKQLKRRRYTGWGRLSRKLINGIRDKQSGKTILDFLKSDGFANRNFMQLIHDDSLTFKEDIQKAQVSGQGDSLHEHIANLAGSPAIKKGILQTVKVVDELVKVMGRHKPENIVIEMARENQTTQKGQKNSRERMKRIEEGIKELGSQILKEHPVENTQLQNEKLYLYYLQNGRDMYVDQELDINRLSDYDVDHIVPQSFLKDDSIDNKVLTRSDKARGKSDNVPSEEVVKKMKNYWRQLLNAKLITQRKFDNLTKAERGGLSELDKAGFIKRQLVETRQITKHVAQILDSRMNTKYDENDKLIREVKVITLKSKLVSDFRKDFQFYKVREINNYHHAHDAYLNAVVGTALIKKYPKLESEFVYGDYKVYDVRKMIAKSEQEIGKATAKYFFYSNIMNFFKTEITLANGEIRKRPLIETNGETGEIVWDKGRDFATVRKVLSMPQVNIVKKTEVQTGGFSKESILPKRNSDKLIARKKDWDPKKYGGFDSPTVAYSVLVVAKVEKGKSKKLKSVKELLGITIMERSSFEKNPIDFLEAKGYKEVKKDLIIKLPKYSLFELENGRKRMLASAGELQKGNELALPSKYVNFLYLASHYEKLKGSPEDNEQKQLFVEQHKHYLDEIIEQISEFSKRVILADANLDKVLSAYNKHRDKPIREQAENIIHLFTLTNLGAPAAFKYFDTTIDRKRYTSTKEVLDATLIHQSITGLYETRIDLSQLGGDGGPAPGSSEAAAKGGTLGDQGSRGSDPLPEPRVTLTVEGIPTEFLVNTGAEHSVLTKPMGKMGSKRTVVAGATGSKVYPWTTKRLLKIGQKQVTHSFLVIPECPAPLLGRDLLTKLKAQIQFSTEGPQVTWEDRPAMCLVLNLEEEYRLHEKPVPPSIDPSWLQLFPMVWAEKAGMGLANQVPPVVVELKSDASPVAVRQYPMSKEAREGIRPHIQRFLDLGILVPCQSPWNTPLLPVKKPGTNDYRPVQDLREVNKRVQDIHPTVPNPYNLLSSLPPSHTWYSVLDLKDAFFCLKLHPNSQPLFAFEWRDPEKGNTGQLTWTRLPQGFKNSPTLFNEALHRDLASFRALNPQVVMLQYVDDLLVAAPTYRDCKEGTRRLLQELSKLGYRVSAKKAQLCREEVTYLGYLLKGGKRWLTPARKATVMKIPTPTTPRQVREFLGTAGFCRLWIPGFASLAAPLYPLTRPKVPFTWTEAHQEAFGRIKEALLSAPALALPDLTKPFALYVDEKEGVARGVLTQTLGPWRRPVAYLSKKLDPVASGWPTCLKAIAAVALLLKDADKLTLGQNVLVIAPHNLESIVRQPPDRWMTNARMTHYQSLLLNERVSFAPPAILNPATLLPVESDDTPIHICSEILAEETGTRPDLRDQPLPGVPAWYTDGSSFIMDGRRQAGAAIVDNKRTVWASNLPEGTSAQKAELIALTQALRLAEGKSINIYTDSRYAFATAHVHGAIYKQRGWLTSAGKDIKNKEEILALLEAIHLPKRVAIIHCPGHQRGTDPVATGNRKADEAAKQAAQSTRILTETTKNAGKRTADGSEFEKRTADGSEFESPKKKAKVE

SEQ ID NO: 7635 - protein, 2218 aa, synthetic construct
MPAAKRVKLDGGDKKYSIGLDIGTNSVGWAVITDEYKVPSKKFKVLGNTDRHSIKKNLIGALLFDSGETAEATRLKRTARRRYTRRKNRICYLQEIFSNEMAKVDDSFFHRLEESFLVEEDKKHERHPIFGNIVDEVAYHEKYPTIYHLRKKLVDSTDKADLRLIYLALAHMIKFRGHFLIEGDLNPDNSDVDKLFIQLVQTYNQLFEENPINASGVDAKAILSARLSKSRRLENLIAQLPGEKKNGLFGNLIALSLGLTPNFKSNFDLAEDAKLQLSKDTYDDDLDNLLAQIGDQYADLFLAAKNLSDAILLSDILRVNTEITKAPLSASMIKRYDEHHQDLTLLKALVRQQLPEKYKEIFFDQSKNGYAGYIDGGASQEEFYKFIKPILEKMDGTEELLVKLNREDLLRKQRTFDNGSIPHQIHLGELHAILRRQEDFYPFLKDNREKIEKILTFRIPYYVGPLARGNSRFAWMTRKSEETITPWNFEEVVDKGASAQSFIERMTNFDKNLPNEKVLPKHSLLYEYFTVYNELTKVKYVTEGMRKPAFLSGEQKKAIVDLLFKTNRKVTVKQLKEDYFKKIECFDSVEISGVEDRFNASLGTYHDLLKIIKDKDFLDNEENEDILEDIVLTLTLFEDREMIEERLKTYAHLFDDKVMKQLKRRRYTGWGRLSRKLINGIRDKQSGKTILDFLKSDGFANRNFMQLIHDDSLTFKEDIQKAQVSGQGDSLHEHIANLAGSPAIKKGILQTVKVVDELVKVMGRHKPENIVIEMARENQTTQKGQKNSRERMKRIEEGIKELGSQILKEHPVENTQLQNEKLYLYYLQNGRDMYVDQELDINRLSDYDVDHIVPQSFLKDDSIDNKVLTRSDKARGKSDNVPSEEVVKKMKNYWRQLLNAKLITQRKFDNLTKAERGGLSELDKAGFIKRQLVETRQITKHVAQILDSRMNTKYDENDKLIREVKVITLKSKLVSDFRKDFQFYKVREINNYHHAHDAYLNAVVGTALIKKYPKLESEFVYGDYKVYDVRKMIAKSEQEIGKATAKYFFYSNIMNFFKTEITLANGEIRKRPLIETNGETGEIVWDKGRDFATVRKVLSMPQVNIVKKTEVQTGGFSKESILPKRNSDKLIARKKDWDPKKYGGFDSPTVAYSVLVVAKVEKGKSKKLKSVKELLGITIMERSSFEKNPIDFLEAKGYKEVKKDLIIKLPKYSLFELENGRKRMLASAGELQKGNELALPSKYVNFLYLASHYEKLKGSPEDNEQKQLFVEQHKHYLDEIIEQISEFSKRVILADANLDKVLSAYNKHRDKPIREQAENIIHLFTLTNLGAPAAFKYFDTTIDRKRYTSTKEVLDATLIHQSITGLYETRIDLSQLGGDGGPAPGSSEAAAKGGTLGDQGSRGSDPLPEPRVTLTVEGIPTEFLVNTGAEHSVLTKPMGKMGSKRTVVAGATGSKVYPWTTKRLLKIGQKQVTHSFLVIPECPAPLLGRDLLTKLKAQIQFSTEGPQVTWEDRPAMCLVLNLEEEYRLHEKPVPPSIDPSWLQLFPMVWAEKAGMGLANQVPPVVVELKSDASPVAVRQYPMSKEAREGIRPHIQRFLDLGILVPCQSPWNTPLLPVKKPGTNDYRPVQDLREVNKRVQDIHPTVPNPYNLLSSLPPSHTWYSVLDLKDAFFCLKLHPNSQPLFAFEWRDPEKGNTGQLTWTRLPQGFKNSPTLFNEALHRDLASFRALNPQVVMLQYVDDLLVAAPTYRDCKEGTRRLLQELSKLGYRVSAKKAQLCREEVTYLGYLLKGGKRWLTPARKATVMKIPTPTTPRQVREFLGKAGFCRLFIPGFASLAAPLYPLTRPKVPFTWTEAHQEAFGRIKEALLSAPALALPDLTKPFALYVDEKEGVARGVLTQTLGPWRRPVAYLSKKLDPVASGWPTCLKAIAAVALLLKDADKLTLGQNVLVIAPHNLESIVRQPPDRWMTNARMTHYQSLLLNERVSFAPPAILNPATLLPVESDDTPIHICSEILAEETGTRPDLRDQPLPGVPAWYTDGSSFIMDGRRQAGAAIVDNKRTVWASNLPEGTSAQKAELIALTQALRLAEGKSINIYTDSRYAFATAHVHGAIYKQRGWLTSAGKDIKNKEEILALLEAIHLPKRVAIIHCPGHQRGTDPVATGNRKADEAAKQAAQSTRILTETTKNAGKRTADGSEFEKRTADGSEFESPKKKAKVE

SEQ ID NO: 7636 - protein, 2096 aa, synthetic construct
MPAAKRVKLDGGDKKYSIGLDIGTNSVGWAVITDEYKVPSKKFKVLGNTDRHSIKKNLIGALLFDSGETAEATRLKRTARRRYTRRKNRICYLQEIFSNEMAKVDDSFFHRLEESFLVEEDKKHERHPIFGNIVDEVAYHEKYPTIYHLRKKLVDSTDKADLRLIYLALAHMIKFRGHFLIEGDLNPDNSDVDKLFIQLVQTYNQLFEENPINASGVDAKAILSARLSKSRRLENLIAQLPGEKKNGLFGNLIALSLGLTPNFKSNFDLAEDAKLQLSKDTYDDDLDNLLAQIGDQYADLFLAAKNLSDAILLSDILRVNTEITKAPLSASMIKRYDEHHQDLTLLKALVRQQLPEKYKEIFFDQSKNGYAGYIDGGASQEEFYKFIKPILEKMDGTEELLVKLNREDLLRKQRTFDNGSIPHQIHLGELHAILRRQEDFYPFLKDNREKIEKILTFRIPYYVGPLARGNSRFAWMTRKSEETITPWNFEEVVDKGASAQSFIERMTNFDKNLPNEKVLPKHSLLYEYFTVYNELTKVKYVTEGMRKPAFLSGEQKKAIVDLLFKTNRKVTVKQLKEDYFKKIECFDSVEISGVEDRFNASLGTYHDLLKIIKDKDFLDNEENEDILEDIVLTLTLFEDREMIEERLKTYAHLFDDKVMKQLKRRRYTGWGRLSRKLINGIRDKQSGKTILDFLKSDGFANRNFMQLIHDDSLTFKEDIQKAQVSGQGDSLHEHIANLAGSPAIKKGILQTVKVVDELVKVMGRHKPENIVIEMARENQTTQKGQKNSRERMKRIEEGIKELGSQILKEHPVENTQLQNEKLYLYYLQNGRDMYVDQELDINRLSDYDVDHIVPQSFLKDDSIDNKVLTRSDKARGKSDNVPSEEVVKKMKNYWRQLLNAKLITQRKFDNLTKAERGGLSELDKAGFIKRQLVETRQITKHVAQILDSRMNTKYDENDKLIREVKVITLKSKLVSDFRKDFQFYKVREINNYHHAHDAYLNAVVGTALIKKYPKLESEFVYGDYKVYDVRKMIAKSEQEIGKATAKYFFYSNIMNFFKTEITLANGEIRKRPLIETNGETGEIVWDKGRDFATVRKVLSMPQVNIVKKTEVQTGGFSKESILPKRNSDKLIARKKDWDPKKYGGFDSPTVAYSVLVVAKVEKGKSKKLKSVKELLGITIMERSSFEKNPIDFLEAKGYKEVKKDLIIKLPKYSLFELENGRKRMLASAGELQKGNELALPSKYVNFLYLASHYEKLKGSPEDNEQKQLFVEQHKHYLDEIIEQISEFSKRVILADANLDKVLSAYNKHRDKPIREQAENIIHLFTLTNLGAPAAFKYFDTTIDRKRYTSTKEVLDATLIHQSITGLYETRIDLSQLGGDGGPAPGSSEAAAKGGTLGIEDEYRLHETSTEPDVSLGSTWLSDFPQAWAETGGMGLAVRQAPLIIPLKATSTPVSIQQYPMSHEARLGIKPHIQRLLDQGILVPCQSPWNTPLLPVKKPGTNDYRPVQDLREVNKRVEDIHPTVPNPYNLLSGLPPSHQWYTVLDLKDAFFCLRLHPTSQPLFAFEWRDPGMGISGQLTWTRLPQGFKNSPTLFNEALHRDLADFRIQHPDLILLQYVDDILLAATSELDCQQGTRALLQTLGDLGYRASAKKAQICQKQVKYLGYLLREGQRWLTEARKETVMGQPVPKTPRQLREFLGTAGFCRLWIPGFAEMAAPLYPLTKPGTLFSWGPDQQKAYQEIKQALLTAPALGLPDLTKPFELFVDEKQGYAKGVLTQKLGPWRRPVAYLSKKLDPVAAGWPPCLRMVAAIAVLTKDAGKLTMGQPLVILAPHAVEALVKQPPDRWLSNARMTHYQAMLLDTDRVQFGPVVALNPATLLPLPEEGAPHDCLEILAETHGTRPDLTDQPIPDADHTWYTDGSSFLQEGQRKAGAAVTTETEVIWAGALPAGTSAQRAELIALTQALKMAEGKRLNVYTDSRYAFATAHIHGEIYRRRGWLTSEGREIKNKSEILALLKALFLPKRLSIIHCLGHQKGDSAEARGNRLADQAAREAAIKTPPDTSTLLAGKRTADGSEFEKRTADGSEFESPKKKAKVE

SEQ ID NO: 7637 - protein, 2096 aa, synthetic construct
MPAAKRVKLDGGDKKYSIGLDIGTNSVGWAVITDEYKVPSKKFKVLGNTDRHSIKKNLIGALLFDSGETAEATRLKRTARRRYTRRKNRICYLQEIFSNEMAKVDDSFFHRLEESFLVEEDKKHERHPIFGNIVDEVAYHEKYPTIYHLRKKLVDSTDKADLRLIYLALAHMIKFRGHFLIEGDLNPDNSDVDKLFIQLVQTYNQLFEENPINASGVDAKAILSARLSKSRRLENLIAQLPGEKKNGLFGNLIALSLGLTPNFKSNFDLAEDAKLQLSKDTYDDDLDNLLAQIGDQYADLFLAAKNLSDAILLSDILRVNTEITKAPLSASMIKRYDEHHQDLTLLKALVRQQLPEKYKEIFFDQSKNGYAGYIDGGASQEEFYKFIKPILEKMDGTEELLVKLNREDLLRKQRTFDNGSIPHQIHLGELHAILRRQEDFYPFLKDNREKIEKILTFRIPYYVGPLARGNSRFAWMTRKSEETITPWNFEEVVDKGASAQSFIERMTNFDKNLPNEKVLPKHSLLYEYFTVYNELTKVKYVTEGMRKPAFLSGEQKKAIVDLLFKTNRKVTVKQLKEDYFKKIECFDSVEISGVEDRFNASLGTYHDLLKIIKDKDFLDNEENEDILEDIVLTLTLFEDREMIEERLKTYAHLFDDKVMKQLKRRRYTGWGRLSRKLINGIRDKQSGKTILDFLKSDGFANRNFMQLIHDDSLTFKEDIQKAQVSGQGDSLHEHIANLAGSPAIKKGILQTVKVVDELVKVMGRHKPENIVIEMARENQTTQKGQKNSRERMKRIEEGIKELGSQILKEHPVENTQLQNEKLYLYYLQNGRDMYVDQELDINRLSDYDVDHIVPQSFLKDDSIDNKVLTRSDKARGKSDNVPSEEVVKKMKNYWRQLLNAKLITQRKFDNLTKAERGGLSELDKAGFIKRQLVETRQITKHVAQILDSRMNTKYDENDKLIREVKVITLKSKLVSDFRKDFQFYKVREINNYHHAHDAYLNAVVGTALIKKYPKLESEFVYGDYKVYDVRKMIAKSEQEIGKATAKYFFYSNIMNFFKTEITLANGEIRKRPLIETNGETGEIVWDKGRDFATVRKVLSMPQVNIVKKTEVQTGGFSKESILPKRNSDKLIARKKDWDPKKYGGFDSPTVAYSVLVVAKVEKGKSKKLKSVKELLGITIMERSSFEKNPIDFLEAKGYKEVKKDLIIKLPKYSLFELENGRKRMLASAGELQKGNELALPSKYVNFLYLASHYEKLKGSPEDNEQKQLFVEQHKHYLDEIIEQISEFSKRVILADANLDKVLSAYNKHRDKPIREQAENIIHLFTLTNLGAPAAFKYFDTTIDRKRYTSTKEVLDATLIHQSITGLYETRIDLSQLGGDGGPAPGSSEAAAKGGTLNIEDEYRLHETSKEPDVSLGSTWLSDFPQAWAETGGMGLAVRQAPLIIPLKATSTPVSIKQYPMSQEARLGIKPHIQRLLDQGILVPCQSPWNTPLLPVKKPGTNDYRPVQDLREVNKRVEDIHPTVPNPYNLLSGLPPSHQWYTVLDLKDAFFCLRLHPTSQPLFAFEWRDPEMGISGQLTWTRLPQGFKNSPTLFDEALHRDLAGFRIQHPDLILLQYVDDLLLAATSELDCQQGTRALLQTLGDLGYRASAKKAQICQKQVKYLGYLLKEGQRWLTEARKETVMGQPIPKTPRQLREFLGTAGFCRLWIPGFAEMAAPLYPLTKTGTLFNWGPDQQKAFQEIKQALLTAPALGLPDLTKPFELFVDEKQGYAKGVLTQKLGPWRRPVAYLSKKLDPVAAGWPPCLRMVAAIAVLTKDAGKLTMGQPLVILAPHAVEALVKQPPDRWLSNARMTHYQALLLDTDRVQFGPVVALNPATLLPLPEEGLQHDCLDILAEAHGTRSDLMDQPLPDADHTWYTDGSSFLQEGQRKAGAAVTTETEVIWARALPAGTSAQRAELIALTQALKMAEGKKLNVYTDSRYAFATAHIHGEIYRRRGLLTSEGKEIKNKDEILALLKALFLPKRLSIIHCPGHQKGNSAEARGNRMADQAAREVATRETPETSTLLAGKRTADGSEFEKRTADGSEFESPKKKAKVE

SEQ ID NO: 7638 - protein, 2096 aa, synthetic construct
MPAAKRVKLDGGDKKYSIGLDIGTNSVGWAVITDEYKVPSKKFKVLGNTDRHSIKKNLIGALLFDSGETAEATRLKRTARRRYTRRKNRICYLQEIFSNEMAKVDDSFFHRLEESFLVEEDKKHERHPIFGNIVDEVAYHEKYPTIYHLRKKLVDSTDKADLRLIYLALAHMIKFRGHFLIEGDLNPDNSDVDKLFIQLVQTYNQLFEENPINASGVDAKAILSARLSKSRRLENLIAQLPGEKKNGLFGNLIALSLGLTPNFKSNFDLAEDAKLQLSKDTYDDDLDNLLAQIGDQYADLFLAAKNLSDAILLSDILRVNTEITKAPLSASMIKRYDEHHQDLTLLKALVRQQLPEKYKEIFFDQSKNGYAGYIDGGASQEEFYKFIKPILEKMDGTEELLVKLNREDLLRKQRTFDNGSIPHQIHLGELHAILRRQEDFYPFLKDNREKIEKILTFRIPYYVGPLARGNSRFAWMTRKSEETITPWNFEEVVDKGASAQSFIERMTNFDKNLPNEKVLPKHSLLYEYFTVYNELTKVKYVTEGMRKPAFLSGEQKKAIVDLLFKTNRKVTVKQLKEDYFKKIECFDSVEISGVEDRFNASLGTYHDLLKIIKDKDFLDNEENEDILEDIVLTLTLFEDREMIEERLKTYAHLFDDKVMKQLKRRRYTGWGRLSRKLINGIRDKQSGKTILDFLKSDGFANRNFMQLIHDDSLTFKEDIQKAQVSGQGDSLHEHIANLAGSPAIKKGILQTVKVVDELVKVMGRHKPENIVIEMARENQTTQKGQKNSRERMKRIEEGIKELGSQILKEHPVENTQLQNEKLYLYYLQNGRDMYVDQELDINRLSDYDVDHIVPQSFLKDDSIDNKVLTRSDKARGKSDNVPSEEVVKKMKNYWRQLLNAKLITQRKFDNLTKAERGGLSELDKAGFIKRQLVETRQITKHVAQILDSRMNTKYDENDKLIREVKVITLKSKLVSDFRKDFQFYKVREINNYHHAHDAYLNAVVGTALIKKYPKLESEFVYGDYKVYDVRKMIAKSEQEIGKATAKYFFYSNIMNFFKTEITLANGEIRKRPLIETNGETGEIVWDKGRDFATVRKVLSMPQVNIVKKTEVQTGGFSKESILPKRNSDKLIARKKDWDPKKYGGFDSPTVAYSVLVVAKVEKGKSKKLKSVKELLGITIMERSSFEKNPIDFLEAKGYKEVKKDLIIKLPKYSLFELENGRKRMLASAGELQKGNELALPSKYVNFLYLASHYEKLKGSPEDNEQKQLFVEQHKHYLDEIIEQISEFSKRVILADANLDKVLSAYNKHRDKPIREQAENIIHLFTLTNLGAPAAFKYFDTTIDRKRYTSTKEVLDATLIHQSITGLYETRIDLSQLGGDGGPAPGSSEAAAKGGTLNIEDEHRLHETSKEPDVSLGSTWLSDFPQAWAETGGMGLAVRQAPLIIPLKATSTPVSIKQYPMSQEARLGIKPHIQRLLDQGILVPCQSPWNTPLLPVKKPGTNDYRPVQDLREVNKRVEDIHPTVPNPYNLLSGLPPSHQWYTVLDLKDAFFCLRLHPTSQPLFAFEWRDPEMGISGQLTWTRLPQGFKNSPTLFDEALHRDLADFRIQHPDLILLQYVDDLLLAATSELDCQQGTRALLQTLGNLGYRASAKKAQICQKQVKYLGYLLKEGQRWLTEARKETVMGQPTPKTPRQLREFLGTAGFCRLWIPGFAEMAAPLYPLTKTGTLFNWGPDQQKAYQEIKQALLTAPALGLPDLTKPFELFVDEKQGYAKGVLTQKLGPWRRPVAYLSKKLDPVAAGWPPCLRMVAAIAVLTKDAGKLTMGQPLVILAPHAVEALVKQPPDRWLSNARMTHYQALLLDTDRVQFGPVVALNPATLLPLPEEGLQHNCLDILAEAHGTRPDLTDQPLPDADHTWYTDGSSLLQEGQRKAGAAVTTETEVIWAKALPAGTSAQRAELIALTQALKMAEGKKLNVYTDSRYAFATAHIHGEIYRRRGLLTSEGKEIKNKDEILALLKALFLPKRLSIIHCPGHQKGHSAEARGNRMADQAARKAAITETPDTSTLLAGKRTADGSEFEKRTADGSEFESPKKKAKVE

SEQ ID NO: 7639 - protein, 2096 aa, synthetic construct
MPAAKRVKLDGGDKKYSIGLDIGTNSVGWAVITDEYKVPSKKFKVLGNTDRHSIKKNLIGALLFDSGETAEATRLKRTARRRYTRRKNRICYLQEIFSNEMAKVDDSFFHRLEESFLVEEDKKHERHPIFGNIVDEVAYHEKYPTIYHLRKKLVDSTDKADLRLIYLALAHMIKFRGHFLIEGDLNPDNSDVDKLFIQLVQTYNQLFEENPINASGVDAKAILSARLSKSRRLENLIAQLPGEKKNGLFGNLIALSLGLTPNFKSNFDLAEDAKLQLSKDTYDDDLDNLLAQIGDQYADLFLAAKNLSDAILLSDILRVNTEITKAPLSASMIKRYDEHHQDLTLLKALVRQQLPEKYKEIFFDQSKNGYAGYIDGGASQEEFYKFIKPILEKMDGTEELLVKLNREDLLRKQRTFDNGSIPHQIHLGELHAILRRQEDFYPFLKDNREKIEKILTFRIPYYVGPLARGNSRFAWMTRKSEETITPWNFEEVVDKGASAQSFIERMTNFDKNLPNEKVLPKHSLLYEYFTVYNELTKVKYVTEGMRKPAFLSGEQKKAIVDLLFKTNRKVTVKQLKEDYFKKIECFDSVEISGVEDRFNASLGTYHDLLKIIKDKDFLDNEENEDILEDIVLTLTLFEDREMIEERLKTYAHLFDDKVMKQLKRRRYTGWGRLSRKLINGIRDKQSGKTILDFLKSDGFANRNFMQLIHDDSLTFKEDIQKAQVSGQGDSLHEHIANLAGSPAIKKGILQTVKVVDELVKVMGRHKPENIVIEMARENQTTQKGQKNSRERMKRIEEGIKELGSQILKEHPVENTQLQNEKLYLYYLQNGRDMYVDQELDINRLSDYDVDHIVPQSFLKDDSIDNKVLTRSDKARGKSDNVPSEEVVKKMKNYWRQLLNAKLITQRKFDNLTKAERGGLSELDKAGFIKRQLVETRQITKHVAQILDSRMNTKYDENDKLIREVKVITLKSKLVSDFRKDFQFYKVREINNYHHAHDAYLNAVVGTALIKKYPKLESEFVYGDYKVYDVRKMIAKSEQEIGKATAKYFFYSNIMNFFKTEITLANGEIRKRPLIETNGETGEIVWDKGRDFATVRKVLSMPQVNIVKKTEVQTGGFSKESILPKRNSDKLIARKKDWDPKKYGGFDSPTVAYSVLVVAKVEKGKSKKLKSVKELLGITIMERSSFEKNPIDFLEAKGYKEVKKDLIIKLPKYSLFELENGRKRMLASAGELQKGNELALPSKYVNFLYLASHYEKLKGSPEDNEQKQLFVEQHKHYLDEIIEQISEFSKRVILADANLDKVLSAYNKHRDKPIREQAENIIHLFTLTNLGAPAAFKYFDTTIDRKRYTSTKEVLDATLIHQSITGLYETRIDLSQLGGDGGPAPGSSEAAAKGGTLNIEDEYRLHETSKEPDVPLGSTWLSDFPQAWAETGGMGLAVRQAPLIIPLKATSTPVSIKQYPMSQEARLGIKPHIQRLLDQGILVPCQSPWNTPLLPVKKPGTNDYRPVQDLREVNKRVEDIHPTVPNPYNLLSGLPPSHQWYTVLDLKDAFFCLRLHPTSQPLFAFEWRDPEMGISGQLTWTRLPQGFKNSPTLFNEALHRDLADFRIQHPDLILLQYVDDLLLAATSEQDCQRGTRALLQTLGNLGYRASAKKAQICQKQVKYLGYLLKEGQRWLTEARKETVMGQPTPKTPRQLREFLGKAGFCRLFIPGFAEMAAPLYPLTKPGTLFNWGPDQQKAYQEIKQALLTAPALGLPDLTKPFELFVDEKQGYAKGVLTQKLGPWRRPVAYLSKKLDPVAAGWPPCLRMVAAIAVLTKDAGKLTMGQPLVILAPHAVEALVKQPPDRWLSNARMTHYQAMLLDTDRVQFGPVVALNPATLLPLPEKEAPHDCLEILAETHGTRPDLTDQPIPDADYTWYTDGSSFLQEGQRRAGAAVTTETEVIWARALPAGTSAQRAELIALTQALKMAEGKKLNVYTDSRYAFATAHVHGEIYRRRGWLTSEGREIKNKNEILALLKALFLPKRLSIIHCPGHQKGNSAEARGNRMADQAAREAAMKAVLETSTLLAGKRTADGSEFEKRTADGSEFESPKKKAKVE

SEQ ID NO: 7640 - protein, 2102 aa, synthetic construct
MPAAKRVKLDGGDKKYSIGLDIGTNSVGWAVITDEYKVPSKKFKVLGNTDRHSIKKNLIGALLFDSGETAEATRLKRTARRRYTRRKNRICYLQEIFSNEMAKVDDSFFHRLEESFLVEEDKKHERHPIFGNIVDEVAYHEKYPTIYHLRKKLVDSTDKADLRLIYLALAHMIKFRGHFLIEGDLNPDNSDVDKLFIQLVQTYNQLFEENPINASGVDAKAILSARLSKSRRLENLIAQLPGEKKNGLFGNLIALSLGLTPNFKSNFDLAEDAKLQLSKDTYDDDLDNLLAQIGDQYADLFLAAKNLSDAILLSDILRVNTEITKAPLSASMIKRYDEHHQDLTLLKALVRQQLPEKYKEIFFDQSKNGYAGYIDGGASQEEFYKFIKPILEKMDGTEELLVKLNREDLLRKQRTFDNGSIPHQIHLGELHAILRRQEDFYPFLKDNREKIEKILTFRIPYYVGPLARGNSRFAWMTRKSEETITPWNFEEVVDKGASAQSFIERMTNFDKNLPNEKVLPKHSLLYEYFTVYNELTKVKYVTEGMRKPAFLSGEQKKAIVDLLFKTNRKVTVKQLKEDYFKKIECFDSVEISGVEDRFNASLGTYHDLLKIIKDKDFLDNEENEDILEDIVLTLTLFEDREMIEERLKTYAHLFDDKVMKQLKRRRYTGWGRLSRKLINGIRDKQSGKTILDFLKSDGFANRNFMQLIHDDSLTFKEDIQKAQVSGQGDSLHEHIANLAGSPAIKKGILQTVKVVDELVKVMGRHKPENIVIEMARENQTTQKGQKNSRERMKRIEEGIKELGSQILKEHPVENTQLQNEKLYLYYLQNGRDMYVDQELDINRLSDYDVDHIVPQSFLKDDSIDNKVLTRSDKARGKSDNVPSEEVVKKMKNYWRQLLNAKLITQRKFDNLTKAERGGLSELDKAGFIKRQLVETRQITKHVAQILDSRMNTKYDENDKLIREVKVITLKSKLVSDFRKDFQFYKVREINNYHHAHDAYLNAVVGTALIKKYPKLESEFVYGDYKVYDVRKMIAKSEQEIGKATAKYFFYSNIMNFFKTEITLANGEIRKRPLIETNGETGEIVWDKGRDFATVRKVLSMPQVNIVKKTEVQTGGFSKESILPKRNSDKLIARKKDWDPKKYGGFDSPTVAYSVLVVAKVEKGKSKKLKSVKELLGITIMERSSFEKNPIDFLEAKGYKEVKKDLIIKLPKYSLFELENGRKRMLASAGELQKGNELALPSKYVNFLYLASHYEKLKGSPEDNEQKQLFVEQHKHYLDEIIEQISEFSKRVILADANLDKVLSAYNKHRDKPIREQAENIIHLFTLTNLGAPAAFKYFDTTIDRKRYTSTKEVLDATLIHQSITGLYETRIDLSQLGGDGGPAPEAAAKGSSGGTVSLQDEHRLFDIPVTTSLPDVWLQDFPQAWAETGGLGRAKCQAPIIIDLKPTAVPVSIKQYPMSLEAHMGIRQHIIKFLELGVLRPCRSPWNTPLLPVKKPGTQDYRPVQDLREINKRTVDIHPTVPNPYNLLSTLKPDYSWYTVLDLKDAFFCLPLAPQSQELFAFEWKDPERGISGQLTWTRLPQGFKNSPTLFDEALHRDLTDFRTQHPEVTLLQYVDDLLLAAPTKKACTQGTRHLLQELGEKGYRASAKKAQICQTKVTYLGYILSEGKRWLTPGRIETVARIPPPRNPREVREFLGTAGFCRLWIPGFAELAAPLYALTKESTPFTWQTEHQLAFEALKKALLSAPALGLPDTSKPFTLFLDERQGIAKGVLTQKLGPWKRPVAYLSKKLDPVAAGWPPCLRIMAATAMLVKDSAKLTLGQPLTVITPHTLEAIVRQPPDRWITNARLTHYQALLLDTDRVQFGPPVTLNPATLLPVPENQPSPHDCRQVLAETHGTREDLKDQELPDADHTWYTDGSSYLDSGTRRAGAAVVDGHNTIWAQSLPPGTSAQKAELIALTKALELSKGKKANIYTDSRYAFATAHTHGSIYERRGLLTSEGKEIKNKAEIIALLKALFLPQEVAIIHCPGHQKGQDPVAVGNRQADRVARQAAMAEVLTLATEPDNTSHITAGKRTADGSEFEKRTADGSEFESPKKKAKVE

SEQ ID NO: 7641 - protein, 2095 aa, synthetic construct
MPAAKRVKLDGGDKKYSIGLDIGTNSVGWAVITDEYKVPSKKFKVLGNTDRHSIKKNLIGALLFDSGETAEATRLKRTARRRYTRRKNRICYLQEIFSNEMAKVDDSFFHRLEESFLVEEDKKHERHPIFGNIVDEVAYHEKYPTIYHLRKKLVDSTDKADLRLIYLALAHMIKFRGHFLIEGDLNPDNSDVDKLFIQLVQTYNQLFEENPINASGVDAKAILSARLSKSRRLENLIAQLPGEKKNGLFGNLIALSLGLTPNFKSNFDLAEDAKLQLSKDTYDDDLDNLLAQIGDQYADLFLAAKNLSDAILLSDILRVNTEITKAPLSASMIKRYDEHHQDLTLLKALVRQQLPEKYKEIFFDQSKNGYAGYIDGGASQEEFYKFIKPILEKMDGTEELLVKLNREDLLRKQRTFDNGSIPHQIHLGELHAILRRQEDFYPFLKDNREKIEKILTFRIPYYVGPLARGNSRFAWMTRKSEETITPWNFEEVVDKGASAQSFIERMTNFDKNLPNEKVLPKHSLLYEYFTVYNELTKVKYVTEGMRKPAFLSGEQKKAIVDLLFKTNRKVTVKQLKEDYFKKIECFDSVEISGVEDRFNASLGTYHDLLKIIKDKDFLDNEENEDILEDIVLTLTLFEDREMIEERLKTYAHLFDDKVMKQLKRRRYTGWGRLSRKLINGIRDKQSGKTILDFLKSDGFANRNFMQLIHDDSLTFKEDIQKAQVSGQGDSLHEHIANLAGSPAIKKGILQTVKVVDELVKVMGRHKPENIVIEMARENQTTQKGQKNSRERMKRIEEGIKELGSQILKEHPVENTQLQNEKLYLYYLQNGRDMYVDQELDINRLSDYDVDHIVPQSFLKDDSIDNKVLTRSDKARGKSDNVPSEEVVKKMKNYWRQLLNAKLITQRKFDNLTKAERGGLSELDKAGFIKRQLVETRQITKHVAQILDSRMNTKYDENDKLIREVKVITLKSKLVSDFRKDFQFYKVREINNYHHAHDAYLNAVVGTALIKKYPKLESEFVYGDYKVYDVRKMIAKSEQEIGKATAKYFFYSNIMNFFKTEITLANGEIRKRPLIETNGETGEIVWDKGRDFATVRKVLSMPQVNIVKKTEVQTGGFSKESILPKRNSDKLIARKKDWDPKKYGGFDSPTVAYSVLVVAKVEKGKSKKLKSVKELLGITIMERSSFEKNPIDFLEAKGYKEVKKDLIIKLPKYSLFELENGRKRMLASAGELQKGNELALPSKYVNFLYLASHYEKLKGSPEDNEQKQLFVEQHKHYLDEIIEQISEFSKRVILADANLDKVLSAYNKHRDKPIREQAENIIHLFTLTNLGAPAAFKYFDTTIDRKRYTSTKEVLDATLIHQSITGLYETRIDLSQLGGDGGPAPEAAAKGSSGGTLQLEEEYRLFEPESTQKQEMDIWLKNFPQAWAETGGMGTAHCQAPVLIQLKATATPISIRQYPMPHEAYQGIKPHIRRMLDQGILKPCQSPWNTPLLPVKKPGTEDYRPVQDLREVNKRVEDIHPTVPNPYNLLSTLPPSHPWYTVLDLKDAFFCLRLHSESQLLFAFEWRDPEIGLSGQLTWTRLPQGFKNSPTLFNEALHSDLADFRVRYPALVLLQYVDDLLLAAATRTECLEGTKALLETLGNKGYRASAKKAQICLQEVTYLGYSLKDGQRWLTKARKEAILSIPVPKNSRQVREFLGTAGYCRLWIPGFAELAAPLYPLTRPGTLFQWGTEQQLAFEDIKKALLSSPALGLPDITKPFELFIDENSGFAKGVLVQKLGPWKRPVAYLSKKLDTVASGWPPCLRMVAAIAILVKDAGKLTLGQPLTILTSHPVEALVRQPPNKWLSNARMTHYQAMLLDAERVHFGPTVSLNPATLLPLPSGGNHHDCLQILAETHGTRPDLTDQPLPDADLTWYTDGSSFIRNGEREAGAAVTTESEVIWAAPLPPGTSAQRAELIALTQALKMAEGKKLTVYTDSRYAFATTHVHGEIYRRRGWLTSEGKEIKNKNEILALLEALFLPKRLSIIHCPGHQKGDSPQAKGNRLADDTAKKAATETHSSLTVLPAGKRTADGSEFEKRTADGSEFESPKKKAKVE

SEQ ID NO: 7642 - protein, 2176 aa, synthetic construct
MPAAKRVKLDGGDKKYSIGLDIGTNSVGWAVITDEYKVPSKKFKVLGNTDRHSIKKNLIGALLFDSGETAEATRLKRTARRRYTRRKNRICYLQEIFSNEMAKVDDSFFHRLEESFLVEEDKKHERHPIFGNIVDEVAYHEKYPTIYHLRKKLVDSTDKADLRLIYLALAHMIKFRGHFLIEGDLNPDNSDVDKLFIQLVQTYNQLFEENPINASGVDAKAILSARLSKSRRLENLIAQLPGEKKNGLFGNLIALSLGLTPNFKSNFDLAEDAKLQLSKDTYDDDLDNLLAQIGDQYADLFLAAKNLSDAILLSDILRVNTEITKAPLSASMIKRYDEHHQDLTLLKALVRQQLPEKYKEIFFDQSKNGYAGYIDGGASQEEFYKFIKPILEKMDGTEELLVKLNREDLLRKQRTFDNGSIPHQIHLGELHAILRRQEDFYPFLKDNREKIEKILTFRIPYYVGPLARGNSRFAWMTRKSEETITPWNFEEVVDKGASAQSFIERMTNFDKNLPNEKVLPKHSLLYEYFTVYNELTKVKYVTEGMRKPAFLSGEQKKAIVDLLFKTNRKVTVKQLKEDYFKKIECFDSVEISGVEDRFNASLGTYHDLLKIIKDKDFLDNEENEDILEDIVLTLTLFEDREMIEERLKTYAHLFDDKVMKQLKRRRYTGWGRLSRKLINGIRDKQSGKTILDFLKSDGFANRNFMQLIHDDSLTFKEDIQKAQVSGQGDSLHEHIANLAGSPAIKKGILQTVKVVDELVKVMGRHKPENIVIEMARENQTTQKGQKNSRERMKRIEEGIKELGSQILKEHPVENTQLQNEKLYLYYLQNGRDMYVDQELDINRLSDYDVDHIVPQSFLKDDSIDNKVLTRSDKARGKSDNVPSEEVVKKMKNYWRQLLNAKLITQRKFDNLTKAERGGLSELDKAGFIKRQLVETRQITKHVAQILDSRMNTKYDENDKLIREVKVITLKSKLVSDFRKDFQFYKVREINNYHHAHDAYLNAVVGTALIKKYPKLESEFVYGDYKVYDVRKMIAKSEQEIGKATAKYFFYSNIMNFFKTEITLANGEIRKRPLIETNGETGEIVWDKGRDFATVRKVLSMPQVNIVKKTEVQTGGFSKESILPKRNSDKLIARKKDWDPKKYGGFDSPTVAYSVLVVAKVEKGKSKKLKSVKELLGITIMERSSFEKNPIDFLEAKGYKEVKKDLIIKLPKYSLFELENGRKRMLASAGELQKGNELALPSKYVNFLYLASHYEKLKGSPEDNEQKQLFVEQHKHYLDEIIEQISEFSKRVILADANLDKVLSAYNKHRDKPIREQAENIIHLFTLTNLGAPAAFKYFDTTIDRKRYTSTKEVLDATLIHQSITGLYETRIDLSQLGGDGGPAPEAAAKGSSGGMNPLQLLQPLPAEIKGTKLLAHWNSGATITCIPESFLEDEQPIKKTLIKTIHGEKQQNVYYVTFKVKGRKVEAEVIASPYEYILLSPTDVPWLTQQPLQLTILVPLQEYQEKILSKTALPEDQKQQLKTLFVKYDNLWQHWENQVGHRKIRPHNIATGDYPPRPQKQYPINPKAKPSIQIVIDDLLKQGVLTPQNSTMNTPVYPVPKPDGRWRMVLDYREVNKTIPLTAAQNQHSAGILATIVRQKYKTTLDLANGFWAHPITPESYWLTAFTWQGKQYCWTRLPQGFLNSPALFNADVVDLLKEIPNVQVYVDDIYLSHDDPKEHVQQLEKVFQILLQAGYVVSLKKSEIGQKTVEFLGFNITKEGRGLTDTFKTKLLNITPPKDLKQLQSILGLLNFARNFIPNFAELVQPLYNLIAPAKGKYIEWSEENTKQLNMVIEALNTASNLEERLPEQRLVIKVNTSPSAGYVRYYNETGKKPIMYLNYVFSKAELKFSMLEKLLTTMHKALIKAMDLAMGQEILVYSPIVSMTKIQKTPLPERKALPIRWITWMTYLEDPRIQFHYDKTLPELKHIPDVYTSSQSPVKHPSQYEGVFYTDGSAIKSPDPTKSNNAGMGIVHATYKPEYQVLNQWSIPLGNHTAQMAEIAAVEFACKKALKIPGPVLVITDSFYVAESANKELPYWKSNGFVNNKKKPLKHISKWKSIAECLSMKPDITIQHEKGISLQIPVFILKGNALADKLATQGSYVVNAGKRTADGSEFEKRTADGSEFESPKKKAKVE

SEQ ID NO: 7643 - protein, 2096 aa, synthetic construct
MPAAKRVKLDGGDKKYSIGLDIGTNSVGWAVITDEYKVPSKKFKVLGNTDRHSIKKNLIGALLFDSGETAEATRLKRTARRRYTRRKNRICYLQEIFSNEMAKVDDSFFHRLEESFLVEEDKKHERHPIFGNIVDEVAYHEKYPTIYHLRKKLVDSTDKADLRLIYLALAHMIKFRGHFLIEGDLNPDNSDVDKLFIQLVQTYNQLFEENPINASGVDAKAILSARLSKSRRLENLIAQLPGEKKNGLFGNLIALSLGLTPNFKSNFDLAEDAKLQLSKDTYDDDLDNLLAQIGDQYADLFLAAKNLSDAILLSDILRVNTEITKAPLSASMIKRYDEHHQDLTLLKALVRQQLPEKYKEIFFDQSKNGYAGYIDGGASQEEFYKFIKPILEKMDGTEELLVKLNREDLLRKQRTFDNGSIPHQIHLGELHAILRRQEDFYPFLKDNREKIEKILTFRIPYYVGPLARGNSRFAWMTRKSEETITPWNFEEVVDKGASAQSFIERMTNFDKNLPNEKVLPKHSLLYEYFTVYNELTKVKYVTEGMRKPAFLSGEQKKAIVDLLFKTNRKVTVKQLKEDYFKKIECFDSVEISGVEDRFNASLGTYHDLLKIIKDKDFLDNEENEDILEDIVLTLTLFEDREMIEERLKTYAHLFDDKVMKQLKRRRYTGWGRLSRKLINGIRDKQSGKTILDFLKSDGFANRNFMQLIHDDSLTFKEDIQKAQVSGQGDSLHEHIANLAGSPAIKKGILQTVKVVDELVKVMGRHKPENIVIEMARENQTTQKGQKNSRERMKRIEEGIKELGSQILKEHPVENTQLQNEKLYLYYLQNGRDMYVDQELDINRLSDYDVDHIVPQSFLKDDSIDNKVLTRSDKARGKSDNVPSEEVVKKMKNYWRQLLNAKLITQRKFDNLTKAERGGLSELDKAGFIKRQLVETRQITKHVAQILDSRMNTKYDENDKLIREVKVITLKSKLVSDFRKDFQFYKVREINNYHHAHDAYLNAVVGTALIKKYPKLESEFVYGDYKVYDVRKMIAKSEQEIGKATAKYFFYSNIMNFFKTEITLANGEIRKRPLIETNGETGEIVWDKGRDFATVRKVLSMPQVNIVKKTEVQTGGFSKESILPKRNSDKLIARKKDWDPKKYGGFDSPTVAYSVLVVAKVEKGKSKKLKSVKELLGITIMERSSFEKNPIDFLEAKGYKEVKKDLIIKLPKYSLFELENGRKRMLASAGELQKGNELALPSKYVNFLYLASHYEKLKGSPEDNEQKQLFVEQHKHYLDEIIEQISEFSKRVILADANLDKVLSAYNKHRDKPIREQAENIIHLFTLTNLGAPAAFKYFDTTIDRKRYTSTKEVLDATLIHQSITGLYETRIDLSQLGGDGGPAPEAAAKGSSGGTLGIEDEYRLHETSTEPDVSLGSTWLSDFPQAWAETGGMGLAVRQAPLIIPLKATSTPVSIQQYPMSHEARLGIKPHIQRLLDQGILVPCQSPWNTPLLPVKKPGTNDYRPVQDLREVNKRVEDIHPTVPNPYNLLSGLPPSHQWYTVLDLKDAFFCLRLHPTSQPLFAFEWRDPGMGISGQLTWTRLPQGFKNSPTLFNEALHRDLADFRIQHPDLILLQYVDDILLAATSELDCQQGTRALLQTLGDLGYRASAKKAQICQKQVKYLGYLLREGQRWLTEARKETVMGQPVPKTPRQLREFLGTAGFCRLWIPGFAEMAAPLYPLTKPGTLFSWGPDQQKAYQEIKQALLTAPALGLPDLTKPFELFVDEKQGYAKGVLTQKLGPWRRPVAYLSKKLDPVAAGWPPCLRMVAAIAVLTKDAGKLTMGQPLVILAPHAVEALVKQPPDRWLSNARMTHYQAMLLDTDRVQFGPVVALNPATLLPLPEEGAPHDCLEILAETHGTRPDLTDQPIPDADHTWYTDGSSFLQEGQRKAGAAVTTETEVIWAGALPAGTSAQRAELIALTQALKMAEGKRLNVYTDSRYAFATAHIHGEIYRRRGWLTSEGREIKNKSEILALLKALFLPKRLSIIHCLGHQKGDSAEARGNRLADQAAREAAIKTPPDTSTLLAGKRTADGSEFEKRTADGSEFESPKKKAKVE

SEQ ID NO: 7644 - protein, 2096 aa, synthetic construct; identical to SEQ ID NO: 7643

SEQ ID NO: 7645 - protein, 2096 aa, synthetic construct
MPAAKRVKLDGGDKKYSIGLDIGTNSVGWAVITDEYKVPSKKFKVLGNTDRHSIKKNLIGALLFDSGETAEATRLKRTARRRYTRRKNRICYLQEIFSNEMAKVDDSFFHRLEESFLVEEDKKHERHPIFGNIVDEVAYHEKYPTIYHLRKKLVDSTDKADLRLIYLALAHMIKFRGHFLIEGDLNPDNSDVDKLFIQLVQTYNQLFEENPINASGVDAKAILSARLSKSRRLENLIAQLPGEKKNGLFGNLIALSLGLTPNFKSNFDLAEDAKLQLSKDTYDDDLDNLLAQIGDQYADLFLAAKNLSDAILLSDILRVNTEITKAPLSASMIKRYDEHHQDLTLLKALVRQQLPEKYKEIFFDQSKNGYAGYIDGGASQEEFYKFIKPILEKMDGTEELLVKLNREDLLRKQRTFDNGSIPHQIHLGELHAILRRQEDFYPFLKDNREKIEKILTFRIPYYVGPLARGNSRFAWMTRKSEETITPWNFEEVVDKGASAQSFIERMTNFDKNLPNEKVLPKHSLLYEYFTVYNELTKVKYVTEGMRKPAFLSGEQKKAIVDLLFKTNRKVTVKQLKEDYFKKIECFDSVEISGVEDRFNASLGTYHDLLKIIKDKDFLDNEENEDILEDIVLTLTLFEDREMIEERLKTYAHLFDDKVMKQLKRRRYTGWGRLSRKLINGIRDKQSGKTILDFLKSDGFANRNFMQLIHDDSLTFKEDIQKAQVSGQGDSLHEHIANLAGSPAIKKGILQTVKVVDELVKVMGRHKPENIVIEMARENQTTQKGQKNSRERMKRIEEGIKELGSQILKEHPVENTQLQNEKLYLYYLQNGRDMYVDQELDINRLSDYDVDHIVPQSFLKDDSIDNKVLTRSDKARGKSDNVPSEEVVKKMKNYWRQLLNAKLITQRKFDNLTKAERGGLSELDKAGFIKRQLVETRQITKHVAQILDSRMNTKYDENDKLIREVKVITLKSKLVSDFRKDFQFYKVREINNYHHAHDAYLNAVVGTALIKKYPKLESEFVYGDYKVYDVRKMIAKSEQEIGKATAKYFFYSNIMNFFKTEITLANGEIRKRPLIETNGETGEIVWDKGRDFATVRKVLSMPQVNIVKKTEVQTGGFSKESILPKRNSDKLIARKKDWDPKKYGGFDSPTVAYSVLVVAKVEKGKSKKLKSVKELLGITIMERSSFEKNPIDFLEAKGYKEVKKDLIIKLPKYSLFELENGRKRMLASAGELQKGNELALPSKYVNFLYLASHYEKLKGSPEDNEQKQLFVEQHKHYLDEIIEQISEFSKRVILADANLDKVLSAYNKHRDKPIREQAENIIHLFTLTNLGAPAAFKYFDTTIDRKRYTSTKEVLDATLIHQSITGLYETRIDLSQLGGDGGPAPEAAAKGSSGGTLNIEDEYRLHETSKGPDVPLGSTWLSDFPQAWAETGGMGLAVRQAPLIIPLKATSTPVSIKQYPMSQEARLGIKPHIQRLLDQGILVPCQSPWNTPLLPVKKPGTNDYRPVQDLREVNKRVEDIHPTVPNPYNLLSGLPPSHQWYTVLDLKDAFFCLRLHPTSQSLFAFEWRDPEMGISGQLTWTRLPQGFKNSPTLFDEALHRDLADFRIQHPDLILLQYVDDLLLAATSELDCQQGTRALLQTLGDLGYRASAKKAQICQKQVKYLGYLLKEGQRWLTEARKETVMGQPTPKTPRQLREFLGTAGFCRLWIPGFAEMAAPLYPLTKTGTLFEWGPDQQKAYQEIKQALLTAPALGLPDLTKPFELFVDEKQGYAKGVLTQKLGPWRRPVAYLSKKLDPVAAGWPPCLRMVAAIAVLTKDAGKLTMGQPLVILAPHAVEALVKQPPDRWLSNARMTHYQALLLDTDRVQFGPIVALNPATLLPLPEEGLQHDCLDILAEAHGTRPDLTDQPLPDADHTWYTDGSSFLQEGQRKAGAAVTTETEVVWAKALPAGTSAQRAELIALTQALKMAEGKKLNVYTDSRYAFATAHIHGEIYRRRGLLTSEGKEIKNKDEILALLKALFLPKRLSIIHCPGHQKGNRAEARGNRMADQAAREVATRETPETSTLLAGKRTADGSEFEKRTADGSEFESPKKKAKVE

SEQ ID NO: 7646 - protein, 2090 aa, synthetic construct
MPAAKRVKLDGGDKKYSIGLDIGTNSVGWAVITDEYKVPSKKFKVLGNTDRHSIKKNLIGALLFDSGETAEATRLKRTARRRYTRRKNRICYLQEIFSNEMAKVDDSFFHRLEESFLVEEDKKHERHPIFGNIVDEVAYHEKYPTIYHLRKKLVDSTDKADLRLIYLALAHMIKFRGHFLIEGDLNPDNSDVDKLFIQLVQTYNQLFEENPINASGVDAKAILSARLSKSRRLENLIAQLPGEKKNGLFGNLIALSLGLTPNFKSNFDLAEDAKLQLSKDTYDDDLDNLLAQIGDQYADLFLAAKNLSDAILLSDILRVNTEITKAPLSASMIKRYDEHHQDLTLLKALVRQQLPEKYKEIFFDQSKNGYAGYIDGGASQEEFYKFIKPILEKMDGTEELLVKLNREDLLRKQRTFDNGSIPHQIHLGELHAILRRQEDFYPFLKDNREKIEKILTFRIPYYVGPLARGNSRFAWMTRKSEETITPWNFEEVVDKGASAQSFIERMTNFDKNLPNEKVLPKHSLLYEYFTVYNELTKVKYVTEGMRKPAFLSGEQKKAIVDLLFKTNRKVTVKQLKEDYFKKIECFDSVEISGVEDRFNASLGTYHDLLKIIKDKDFLDNEENEDILEDIVLTLTLFEDREMIEERLKTYAHLFDDKVMKQLKRRRYTGWGRLSRKLINGIRDKQSGKTILDFLKSDGFANRNFMQLIHDDSLTFKEDIQKAQVSGQGDSLHEHIANLAGSPAIKKGILQTVKVVDELVKVMGRHKPENIVIEMARENQTTQKGQKNSRERMKRIEEGIKELGSQILKEHPVENTQLQNEKLYLYYLQNGRDMYVDQELDINRLSDYDVDHIVPQSFLKDDSIDNKVLTRSDKARGKSDNVPSEEVVKKMKNYWRQLLNAKLITQRKFDNLTKAERGGLSELDKAGFIKRQLVETRQITKHVAQILDSRMNTKYDENDKLIREVKVITLKSKLVSDFRKDFQFYKVREINNYHHAHDAYLNAVVGTALIKKYPKLESEFVYGDYKVYDVRKMIAKSEQEIGKATAKYFFYSNIMNFFKTEITLANGEIRKRPLIETNGETGEIVWDKGRDFATVRKVLSMPQVNIVKKTEVQTGGFSKESILPKRNSDKLIARKKDWDPKKYGGFDSPTVAYSVLVVAKVEKGKSKKLKSVKELLGITIMERSSFEKNPIDFLEAKGYKEVKKDLIIKLPKYSLFELENGRKRMLASAGELQKGNELALPSKYVNFLYLASHYEKLKGSPEDNEQKQLFVEQHKHYLDEIIEQISEFSKRVILADANLDKVLSAYNKHRDKPIREQAENIIHLFTLTNLGAPAAFKYFDTTIDRKRYTSTKEVLDATLIHQSITGLYETRIDLSQLGGDGGPAPEAAAKGSSGGTLQLDDEYRLYSPLVKPDQNIQFWLEQFPQAWAETAGMGLAKQVPPQVIQLKASATPVSVRQYPLSKEAQEGIRPHVQRLIQQGILVPVQSPWNTPLLPVRKPGTNDYRPVQDLREVNKRVQDIHPTVPNPYNLLCALPPQRSWYTVLDLKDAFFCLRLHPTSQPLFAFEWRDPGTGRTGQLTWTRLPQGFKNSPTIFDEALHRDLANFRIQHPQVTLLQYVDDLLLAGATKQDCLEGTKALLLELSDLGYRASAKKAQICRREVTYLGYSLRDGQRWLTEARKKTVVQIPAPTTAKQVREFLGTAGFCRLWIPGFATLAAPLYPLTKEKGEFSWAPEHQKAFDAIKKALLSAPALALPDVTKPFTLYVDERKGVARGVLTQTLGPWRRPVAYLSKKLDPVASGWPVCLKAIAAVAILVKDADKLTLGQNITVIAPHALENIVRQPPDRWMTNARMTHYQSLLLTERVTFAPPAALNPATLLPEETDEPVTHDCHQLLIEETGVRKDLTDIPLTGEVLTWFTDGSSYVVEGKRMAGAAVVDGTRTIWASSLPEGTSAQKAELMALTQALRLAEGKSINIYTDSRYAFATAHVHGAIYKQRGLLTSAGREIKNKEEILSLLEALHLPKRLAIIHCPGHQKAKDPISRGNQMADRVAKQAAQGVNLLAGKRTADGSEFEKRTADGSEFESPKKKAKVE

SEQ ID NO: 7647 - protein, 2087 aa, synthetic construct
MPAAKRVKLDGGDKKYSIGLDIGTNSVGWAVITDEYKVPSKKFKVLGNTDRHSIKKNLIGALLFDSGETAEATRLKRTARRRYTRRKNRICYLQEIFSNEMAKVDDSFFHRLEESFLVEEDKKHERHPIFGNIVDEVAYHEKYPTIYHLRKKLVDSTDKADLRLIYLALAHMIKFRGHFLIEGDLNPDNSDVDKLFIQLVQTYNQLFEENPINASGVDAKAILSARLSKSRRLENLIAQLPGEKKNGLFGNLIALSLGLTPNFKSNFDLAEDAKLQLSKDTYDDDLDNLLAQIGDQYADLFLAAKNLSDAILLSDILRVNTEITKAPLSASMIKRYDEHHQDLTLLKALVRQQLPEKYKEIFFDQSKNGYAGYIDGGASQEEFYKFIKPILEKMDGTEELLVKLNREDLLRKQRTFDNGSIPHQIHLGELHAILRRQEDFYPFLKDNREKIEKILTFRIPYYVGPLARGNSRFAWMTRKSEETITPWNFEEVVDKGASAQSFIERMTNFDKNLPNEKVLPKHSLLYEYFTVYNELTKVKYVTEGMRKPAFLSGEQKKAIVDLLFKTNRKVTVKQLKEDYFKKIECFDSVEISGVEDRFNASLGTYHDLLKIIKDKDFLDNEENEDILEDIVLTLTLFEDREMIEERLKTYAHLFDDKVMKQLKRRRYTGWGRLSRKLINGIRDKQSGKTILDFLKSDGFANRNFMQLIHDDSLTFKEDIQKAQVSGQGDSLHEHIANLAGSPAIKKGILQTVKVVDELVKVMGRHKPENIVIEMARENQTTQKGQKNSRERMKRIEEGIKELGSQILKEHPVENTQLQNEKLYLYYLQNGRDMYVDQELDINRLSDYDVDHIVPQSFLKDDSIDNKVLTRSDKARGKSDNVPSEEVVKKMKNYWRQLLNAKLITQRKFDNLTKAERGGLSELDKAGFIKRQLVETRQITKHVAQILDSRMNTKYDENDKLIREVKVITLKSKLVSDFRKDFQFYKVREINNYHHAHDAYLNAVVGTALIKKYPKLESEFVYGDYKVYDVRKMIAKSEQEIGKATAKYFFYSNIMNFFKTEITLANGEIRKRPLIETNGETGEIVWDKGRDFATVRKVLSMPQVNIVKKTEVQTGGFSKESILPKRNSDKLIARKKDWDPKKYGGFDSPTVAYSVLVVAKVEKGKSKKLKSVKELLGITIMERSSFEKNPIDFLEAKGYKEVKKDLIIKLPKYSLFELENGRKRMLASAGELQKGNELALPSKYVNFLYLASHYEKLKGSPEDNEQKQLFVEQHKHYLDEIIEQISEFSKRVILADANLDKVLSAYNKHRDKPIREQAENIIHLFTLTNLGAPAAFKYFDTTIDRKRYTSTKEVLDATLIHQSITGLYETRIDLSQLGGDGGPAPEAAAKGSSGGIPWLMKKPLQLTTLVPLQEYEERLLKQTMLTGSYKEKLQSLFLKYDALWQHWENQVGHRRIKPHHIATGTVNPRPQKQYPINPKAKASIQTVINDLLKQGVLIQQNSIMNTPVYPVPKPDGKWRMVLDYREVNKTIPLIAAQNQHSAGILSSIFRGKYKTTLDLSNGFWAHSITPESYWLTAFTWLGQQYCWTRLPQGFLNSPALFNADVVDLLKEVPNVQVYVDDIYISHDDPREHLEQLEKVFSLLLNAGYVVSLKKSEIAQHEVEFLGFNITKEGRGLTETFKQKLLNITPPRDLKQLQSILGLLNFARNFIPNFSELVKPLYNIIATAPGKYITWTTDNSQQLQNIISMLNSAENLEERNPEVRLIMKVNTSPSAGYIRFYNEFAKRPIMYLNYVYTKAEVKFTNTEKLLTTIHKGLIKALDLGMGQEILVYSPIVSMTKIQKTPLPERKALPIRWITWMSYLEDPRIQFHYDKTLPELQQVPTVTDDIIAKIKHPSEFSMVFYTDGSAIKHPNVNKSHNAGMGIAQVQFKPEFTVINTWSIPLGDHTAQLAEVAAVEFACKKALKIDGPVLIVTDSFYVAESVNKELPYWQSNGFFNNKKKPLKHVSKWKSIADCIQLKPDIIIIHEKGHQPTASTFHTEGNNLADKLATQGSYVVNAGKRTADGSEFEKRTADGSEFESPKKKAKVE

SEQ ID NO: 7648 - protein, 2176 aa, synthetic construct
MPAAKRVKLDGGDKKYSIGLDIGTNSVGWAVITDEYKVPSKKFKVLGNTDRHSIKKNLIGALLFDSGETAEATRLKRTARRRYTRRKNRICYLQEIFSNEMAKVDDSFFHRLEESFLVEEDKKHERHPIFGNIVDEVAYHEKYPTIYHLRKKLVDSTDKADLRLIYLALAHMIKFRGHFLIEGDLNPDNSDVDKLFIQLVQTYNQLFEENPINASGVDAKAILSARLSKSRRLENLIAQLPGEKKNGLFGNLIALSLGLTPNFKSNFDLAEDAKLQLSKDTYDDDLDNLLAQIGDQYADLFLAAKNLSDAILLSDILRVNTEITKAPLSASMIKRYDEHHQDLTLLKALVRQQLPEKYKEIFFDQSKNGYAGYIDGGASQEEFYKFIKPILEKMDGTEELLVKLNREDLLRKQRTFDNGSIPHQIHLGELHAILRRQEDFYPFLKDNREKIEKILTFRIPYYVGPLARGNSRFAWMTRKSEETITPWNFEEVVDKGASAQSFIERMTNFDKNLPNEKVLPKHSLLYEYFTVYNELTKVKYVTEGMRKPAFLSGEQKKAIVDLLFKTNRKVTVKQLKEDYFKKIECFDSVEISGVEDRFNASLGTYHDLLKIIKDKDFLDNEENEDILEDIVLTLTLFEDREMIEERLKTYAHLFDDKVMKQLKRRRYTGWGRLSRKLINGIRDKQSGKTILDFLKSDGFANRNFMQLIHDDSLTFKEDIQKAQVSGQGDSLHEHIANLAGSPAIKKGILQTVKVVDELVKVMGRHKPENIVIEMARENQTTQKGQKNSRERMKRIEEGIKELGSQILKEHPVENTQLQNEKLYLYYLQNGRDMYVDQELDINRLSDYDVDHIVPQSFLKDDSIDNKVLTRSDKARGKSDNVPSEEVVKKMKNYWRQLLNAKLITQRKFDNLTKAERGGLSELDKAGFIKRQLVETRQITKHVAQILDSRMNTKYDENDKLIREVKVITLKSKLVSDFRKDFQFYKVREINNYHHAHDAYLNAVVGTALIKKYPKLESEFVYGDYKVYDVRKMIAKSEQEIGKATAKYFFYSNIMNFFKTEITLANGEIRKRPLIETNGETGEIVWDKGRDFATVRKVLSMPQVNIVKKTEVQTGGFSKESILPKRNSDKLIARKKDWDPKKYGGFDSPTVAYSVLVVAKVEKGKSKKLKSVKELLGITIMERSSFEKNPIDFLEAKGYKEVKKDLIIKLPKYSLFELENGRKRMLASAGELQKGNELALPSKYVNFLYLASHYEKLKGSPEDNEQKQLFVEQHKHYLDEIIEQISEFSKRVILADANLDKVLSAYNKHRDKPIREQAENIIHLFTLTNLGAPAAFKYFDTTIDRKRYTSTKEVLDATLIHQSITGLYETRIDLSQLGGDGGPAPEAAAKGSSGGMNPLQLLQPLPAEVKGTKLLAHWNSGATITCIPESFLEDEQPIKQTLIKTIHGEKQQNVYYLTFKVKGRKVEAEVIASPYEYILLSPTDVPWLTQQPLQLTILVPLQEYQDRILNKTALPEEQKQQLKALFTKYDNLWQHWENQVGHRKIRPHNIATGDYPPRPQKQYPINPKAKPSIQIVIDDLLKQGVLTPQNSTMNTPVYPVPKPDGRWRMVLDYREVNKTIPLTAAQNQHSAGILATIVRQKYKTTLDLANGFWAHPITPDSYWLTAFTWQGKQYCWTRLPQGFLNSPALFNADAVDLLKEVPNVQVYVDDIYLSHDNPHEHIQQLEKVFQILLQAGYVVSLKKSEIGQRTVEFLGFNITKEGRGLTDTFKTKLLNVTPPKDLKQLQSILGKLNFARNFIPNFAELVQTLYNLIASSPGKYIEWTEDNTKQLNKVIEALNTASNLEERLPDQRLVIKVNTSPSAGYVRYYNESGKKPIMYLNYVFSKAELKFSMLEKLLTTMHKALIKAMDLAMGQEILVYSPIVSMTKIQKTPLPERKALPIRWITWMTYLEDPRIQFHYDKTLPELKHIPDVYTSSIPPLKHPSQYEGVFCTDGSAIKSPDPTKSNNAGMGIVHAIYNPEYKILNQWSIPLGHHTAQMAEIAAVEFACKKALKVPGPVLVITDSFYVAESANKELPYWKSNGFVNNKKEPLKHISKWKSIAECLSIKPDITIQHEKGHQPINTSIHTEGNALADKLATQGSYVVNAGKRTADGSEFEKRTADGSEFESPKKKAKVE

SEQ ID NO: 7649 - protein, 2096 aa, synthetic construct
MPAAKRVKLDGGDKKYSIGLDIGTNSVGWAVITDEYKVPSKKFKVLGNTDRHSIKKNLIGALLFDSGETAEATRLKRTARRRYTRRKNRICYLQEIFSNEMAKVDDSFFHRLEESFLVEEDKKHERHPIFGNIVDEVAYHEKYPTIYHLRKKLVDSTDKADLRLIYLALAHMIKFRGHFLIEGDLNPDNSDVDKLFIQLVQTYNQLFEENPINASGVDAKAILSARLSKSRRLENLIAQLPGEKKNGLFGNLIALSLGLTPNFKSNFDLAEDAKLQLSKDTYDDDLDNLLAQIGDQYADLFLAAKNLSDAILLSDILRVNTEITKAPLSASMIKRYDEHHQDLTLLKALVRQQLPEKYKEIFFDQSKNGYAGYIDGGASQEEFYKFIKPILEKMDGTEELLVKLNREDLLRKQRTFDNGSIPHQIHLGELHAILRRQEDFYPFLKDNREKIEKILTFRIPYYVGPLARGNSRFAWMTRKSEETITPWNFEEVVDKGASAQSFIERMTNFDKNLPNEKVLPKHSLLYEYFTVYNELTKVKYVTEGMRKPAFLSGEQKKAIVDLLFKTNRKVTVKQLKEDYFKKIECFDSVEISGVEDRFNASLGTYHDLLKIIKDKDFLDNEENEDILEDIVLTLTLFEDREMIEERLKTYAHLFDDKVMKQLKRRRYTGWGRLSRKLINGIRDKQSGKTILDFLKSDGFANRNFMQLIHDDSLTFKEDIQKAQVSGQGDSLHEHIANLAGSPAIKKGILQTVKVVDELVKVMGRHKPENIVIEMARENQTTQKGQKNSRERMKRIEEGIKELGSQILKEHPVENTQLQNEKLYLYYLQNGRDMYVDQELDINRLSDYDVDHIVPQSFLKDDSIDNKVLTRSDKARGKSDNVPSEEVVKKMKNYWRQLLNAKLITQRKFDNLTKAERGGLSELDKAGFIKRQLVETRQITKHVAQILDSRMNTKYDENDKLIREVKVITLKSKLVSDFRKDFQFYKVREINNYHHAHDAYLNAVVGTALIKKYPKLESEFVYGDYKVYDVRKMIAKSEQEIGKATAKYFFYSNIMNFFKTEITLANGEIRKRPLIETNGETGEIVWDKGRDFATVRKVLSMPQVNIVKKTEVQTGGFSKESILPKRNSDKLIARKKDWDPKKYGGFDSPTVAYSVLVVAKVEKGKSKKLKSVKELLGITIMERSSFEKNPIDFLEAKGYKEVKKDLIIKLPKYSLFELENGRKRMLASAGELQKGNELALPSKYVNFLYLASHYEKLKGSPEDNEQKQLFVEQHKHYLDEIIEQISEFSKRVILADANLDKVLSAYNKHRDKPIREQAENIIHLFTLTNLGAPAAFKYFDTTIDRKRYTSTKEVLDATLIHQSITGLYETRIDLSQLGGDGGPAPEAAAKGSSGGTLNIEDEYRLHETSKEPDVPLGSTWLSDFPQAWAETGGMGLAVRQAPLIIPLKATSTPVSIKQYPMSQEARLGIKPHIQRLLDQGILVPCQSPWNTPLLPVKKPGTNDYRPVQDLREVNKRVEDIHPTVPNPYNLLSGLPPSHQWYTVLDLKDAFFCLRLHPTSQPLFAFEWRDPEMGISGQLTWTRLPQGFKNSPTLFNEALHRDLADFRIQHPDLILLQYVDDLLLAATSEQDCQRGTRALLQTLGNLGYRASAKKAQICQKQVKYLGYLLKEGQRWLTEARKETVMGQPTPKTPRQLREFLGTAGFCRLWIPGFAEMAAPLYPLTKPGTLFNWGPDQQKAYQEIKQALLTAPALGLPDLTKPFELFVDEKQGYAKGVLTQKLGPWRRPVAYLSKKLDPVAAGWPPCLRMVAAIAVLTKDAGKLTMGQPLVILAPHAVEALVKQPPDRWLSNARMTHYQAMLLDTDRVQFGPVVALNPATLLPLPEKEAPHDCLEILAETHGTRPDLTDQPIPDADYTWYTDGSSFLQEGQRRAGAAVTTETEVIWARALPAGTSAQRAELIALTQALKMAEGKKLNVYTDSRYAFATAHVHGEIYRRRGWLTSEGREIKNKNEILALLKALFLPKRLSIIHCPGHQKGNSAEARGNRMADQAAREAAMKAVLETSTLLAGKRTADGSEFEKRTADGSEFESPKKKAKVE

SEQ ID NO: 7650 - protein, 2122 aa, synthetic construct
MPAAKRVKLDGGDKKYSIGLDIGTNSVGWAVITDEYKVPSKKFKVLGNTDRHSIKKNLIGALLFDSGETAEATRLKRTARRRYTRRKNRICYLQEIFSNEMAKVDDSFFHRLEESFLVEEDKKHERHPIFGNIVDEVAYHEKYPTIYHLRKKLVDSTDKADLRLIYLALAHMIKFRGHFLIEGDLNPDNSDVDKLFIQLVQTYNQLFEENPINASGVDAKAILSARLSKSRRLENLIAQLPGEKKNGLFGNLIALSLGLTPNFKSNFDLAEDAKLQLSKDTYDDDLDNLLAQIGDQYADLFLAAKNLSDAILLSDILRVNTEITKAPLSASMIKRYDEHHQDLTLLKALVRQQLPEKYKEIFFDQSKNGYAGYIDGGASQEEFYKFIKPILEKMDGTEELLVKLNREDLLRKQRTFDNGSIPHQIHLGELHAILRRQEDFYPFLKDNREKIEKILTFRIPYYVGPLARGNSRFAWMTRKSEETITPWNFEEVVDKGASAQSFIERMTNFDKNLPNEKVLPKHSLLYEYFTVYNELTKVKYVTEGMRKPAFLSGEQKKAIVDLLFKTNRKVTVKQLKEDYFKKIECFDSVEISGVEDRFNASLGTYHDLLKIIKDKDFLDNEENEDILEDIVLTLTLFEDREMIEERLKTYAHLFDDKVMKQLKRRRYTGWGRLSRKLINGIRDKQSGKTILDFLKSDGFANRNFMQLIHDDSLTFKEDIQKAQVSGQGDSLHEHIANLAGSPAIKKGILQTVKVVDELVKVMGRHKPENIVIEMARENQTTQKGQKNSRERMKRIEEGIKELGSQILKEHPVENTQLQNEKLYLYYLQNGRDMYVDQELDINRLSDYDVDHIVPQSFLKDDSIDNKVLTRSDKARGKSDNVPSEEVVKKMKNYWRQLLNAKLITQRKFDNLTKAERGGLSELDKAGFIKRQLVETRQITKHVAQILDSRMNTKYDENDKLIREVKVITLKSKLVSDFRKDFQFYKVREINNYHHAHDAYLNAVVGTALIKKYPKLESEFVYGDYKVYDVRKMIAKSEQEIGKATAKYFFYSNIMNFFKTEITLANGEIRKRPLIETNGETGEIVWDKGRDFATVRKVLSMPQVNIVKKTEVQTGGFSKESILPKRNSDKLIARKKDWDPKKYGGFDSPTVAYSVLVVAKVEKGKSKKLKSVKELLGITIMERSSFEKNPIDFLEAKGYKEVKKDLIIKLPKYSLFELENGRKRMLASAGELQKGNELALPSKYVNFLYLASHYEKLKGSPEDNEQKQLFVEQHKHYLDEIIEQISEFSKRVILADANLDKVLSAYNKHRDKPIREQAENIIHLFTLTNLGAPAAFKYFDTTIDRKRYTSTKEVLDATLIHQSITGLYETRIDLSQLGGDGGAEAAAKEAAAKEAAAKEAAAKALEAEAAAKEAAAKEAAAKEAAAKAGGVPWILKKPLELTIKLDLEEQQGTLLNNSILSKKGKEELKQLFEKYSALWQSWENQVGHRRIRPHKIATGTVKPTPQKQYHINPKAKPDIQIVINDLLKQGVLIQKESTMNTPVYPVPKPNGRWRMVLDYRAVNKVTPLIAVQNQHSYGILGSLFKGRYKTTIDLSNGFWAHPIVPEDYWITAFTWQGKQYCWTVLPQGFLNSPGLFTGDVVDLLQGIPNVEVYVDDVYISHDSEKEHLEYLDILFNRLKEAGYIISLKKSNIANSIVDFLGFQITNEGRGLTDTFKEKLENITAPTTLKQLQSILGLLNFARNFIPDFTELIAPLYALIPKSTKNYVPWQIEHSTTLETLITKLNGAEYLQGRKGDKTLIMKVNASYTTGYIRYYNEGEKKPISYVSIVFSKTELKFTELEKLLTTVHKGLLKALDLSMGQNIHVYSPIVSMQNIQKTPQTAKKALASRWLSWLSYLEDPRIRFFYDPQMPALKDLPAVDTGKDNKKHPSNFQHIFYTDGSAITSPTKEGHLNAGMGIVYFINKDGNLQKQQEWSISLGNHTAQFAEIAAFEFALKKCLPLGGNILVVTDSNYVAKAYNEELDVWASNGFVNNRKKPLKHISKWKSVADLKRLRPDVVVTHEPGHQKLDSSPHAYGNNLADQLATQASFKVHAGKRTADGSEFEKRTADGSEFESPKKKAKVE

SEQ ID NO: 7651 - protein, 2122 aa, synthetic construct
MPAAKRVKLDGGDKKYSIGLDIGTNSVGWAVITDEYKVPSKKFKVLGNTDRHSIKKNLIGALLFDSGETAEATRLKRTARRRYTRRKNRICYLQEIFSNEMAKVDDSFFHRLEESFLVEEDKKHERHPIFGNIVDEVAYHEKYPTIYHLRKKLVDSTDKADLRLIYLALAHMIKFRGHFLIEGDLNPDNSDVDKLFIQLVQTYNQLFEENPINASGVDAKAILSARLSKSRRLENLIAQLPGEKKNGLFGNLIALSLGLTPNFKSNFDLAEDAKLQLSKDTYDDDLDNLLAQIGDQYADLFLAAKNLSDAILLSDILRVNTEITKAPLSASMIKRYDEHHQDLTLLKALVRQQLPEKYKEIFFDQSKNGYAGYIDGGASQEEFYKFIKPILEKMDGTEELLVKLNREDLLRKQRTFDNGSIPHQIHLGELHAILRRQEDFYPFLKDNREKIEKILTFRIPYYVGPLARGNSRFAWMTRKSEETITPWNFEEVVDKGASAQSFIERMTNFDKNLPNEKVLPKHSLLYEYFTVYNELTKVKYVTEGMRKPAFLSGEQKKAIVDLLFKTNRKVTVKQLKEDYFKKIECFDSVEISGVEDRFNASLGTYHDLLKIIKDKDFLDNEENEDILEDIVLTLTLFEDREMIEERLKTYAHLFDDKVMKQLKRRRYTGWGRLSRKLINGIRDKQSGKTILDFLKSDGFANRNFMQLIHDDSLTFKEDIQKAQVSGQGDSLHEHIANLAGSPAIKKGILQTVKVVDELVKVMGRHKPENIVIEMARENQTTQKGQKNSRERMKRIEEGIKELGSQILKEHPVENTQLQNEKLYLYYLQNGRDMYVDQELDINRLSDYDVDHIVPQSFLKDDSIDNKVLTRSDKARGKSDNVPSEEVVKKMKNYWRQLLNAKLITQRKFDNLTKAERGGLSELDKAGFIKRQLVETRQITKHVAQILDSRMNTKYDENDKLIREVKVITLKSKLVSDFRKDFQFYKVREINNYHHAHDAYLNAVVGTALIKKYPKLESEFVYGDYKVYDVRKMIAKSEQEIGKATAKYFFYSNIMNFFKTEITLANGEIRKRPLIETNGETGEIVWDKGRDFATVRKVLSMPQVNIVKKTEVQTGGFSKESILPKRNSDKLIARKKDWDPKKYGGFDSPTVAYSVLVVAKVEKGKSKKLKSVKELLGITIMERSSFEKNPIDFLEAKGYKEVKKDLIIKLPKYSLFELENGRKRMLASAGELQKGNELALPSKYVNFLYLASHYEKLKGSPEDNEQKQLFVEQHKHYLDEIIEQISEFSKRVILADANLDKVLSAYNKHRDKPIREQAENIIHLFTLTNLGAPAAFKYFDTTIDRKRYTSTKEVLDATLIHQSITGLYETRIDLSQLGGDGGAEAAAKEAAAKEAAAKEAAAKALEAEAAAKEAAAKEAAAKEAAAKAGGVPWILKKPLELTIKLDLEEQQGTLLNNSILSKKGKEELKQLFEKYSALWQSWENQVGHRRIRPHKIATGTVKPTPQKQYHINPKAKPDIQIVINDLLKQGVLIQKESTMNTPVYPVPKPNGRWRMVLDYRAVNKVTPLIAVQNQHSYGILGSLFKGRYKTTIDLSNGFWAHPIVPEDYWITAFTWQGKQYCWTVLPQGFLNSPGLFNGDVVDLLQGIPNVEVYVDDVYISHDSEKEHLEYLDILFNRLKEAGYIISLKKSNIANSIVDFLGFQITNEGRGLTDTFKEKLENITAPTTLKQLQSILGKLNFARNFIPDFTELIAPLYALIPKSPKNYVPWQIEHSTTLETLITKLNGAEYLQGRKGDKTLIMKVNASYTTGYIRYYNEGEKKPISYVSIVFSKTELKFTELEKLLTTVHKGLLKALDLSMGQNIHVYSPIVSMQNIQKTPQTAKKALASRWLSWLSYLEDPRIRFFYDPQMPALKDLPAVDTGKDNKKHPSNFQHIFYTDGSAITSPTKEGHLNAGMGIVYFINKDGNLQKQQEWSISLGNHTAQFAEIAAFEFALKKCLPLGGNILVVTDSNYVAKAYNEELDVWASNGFVNNRKKPLKHISKWKSVADLKRLRPDVVVTHEPGHQKLDSSPHAYGNNLADQLATQASFKVHAGKRTADGSEFEKRTADGSEFESPKKKAKVE

SEQ ID NO: 7652 - protein, 2122 aa, synthetic construct
MPAAKRVKLDGGDKKYSIGLDIGTNSVGWAVITDEYKVPSKKFKVLGNTDRHSIKKNLIGALLFDSGETAEATRLKRTARRRYTRRKNRICYLQEIFSNEMAKVDDSFFHRLEESFLVEEDKKHERHPIFGNIVDEVAYHEKYPTIYHLRKKLVDSTDKADLRLIYLALAHMIKFRGHFLIEGDLNPDNSDVDKLFIQLVQTYNQLFEENPINASGVDAKAILSARLSKSRRLENLIAQLPGEKKNGLFGNLIALSLGLTPNFKSNFDLAEDAKLQLSKDTYDDDLDNLLAQIGDQYADLFLAAKNLSDAILLSDILRVNTEITKAPLSASMIKRYDEHHQDLTLLKALVRQQLPEKYKEIFFDQSKNGYAGYIDGGASQEEFYKFIKPILEKMDGTEELLVKLNREDLLRKQRTFDNGSIPHQIHLGELHAILRRQEDFYPFLKDNREKIEKILTFRIPYYVGPLARGNSRFAWMTRKSEETITPWNFEEVVDKGASAQSFIERMTNFDKNLPNEKVLPKHSLLYEYFTVYNELTKVKYVTEGMRKPAFLSGEQKKAIVDLLFKTNRKVTVKQLKEDYFKKIECFDSVEISGVEDRFNASLGTYHDLLKIIKDKDFLDNEENEDILEDIVLTLTLFEDREMIEERLKTYAHLFDDKVMKQLKRRRYTGWGRLSRKLINGIRDKQSGKTILDFLKSDGFANRNFMQLIHDDSLTFKEDIQKAQVSGQGDSLHEHIANLAGSPAIKKGILQTVKVVDELVKVMGRHKPENIVIEMARENQTTQKGQKNSRERMKRIEEGIKELGSQILKEHPVENTQLQNEKLYLYYLQNGRDMYVDQELDINRLSDYDVDHIVPQSFLKDDSIDNKVLTRSDKARGKSDNVPSEEVVKKMKNYWRQLLNAKLITQRKFDNLTKAERGGLSELDKAGFIKRQLVETRQITKHVAQILDSRMNTKYDENDKLIREVKVITLKSKLVSDFRKDFQFYKVREINNYHHAHDAYLNAVVGTALIKKYPKLESEFVYGDYKVYDVRKMIAKSEQEIGKATAKYFFYSNIMNFFKTEITLANGEIRKRPLIETNGETGEIVWDKGRDFATVRKVLSMPQVNIVKKTEVQTGGFSKESILPKRNSDKLIARKKDWDPKKYGGFDSPTVAYSVLVVAKVEKGKSKKLKSVKELLGITIMERSSFEKNPIDFLEAKGYKEVKKDLIIKLPKYSLFELENGRKRMLASAGELQKGNELALPSKYVNFLYLASHYEKLKGSPEDNEQKQLFVEQHKHYLDEIIEQISEFSKRVILADANLDKVLSAYNKHRDKPIREQAENIIHLFTLTNLGAPAAFKYFDTTIDRKRYTSTKEVLDATLIHQSITGLYETRIDLSQLGGDGGAEAAAKEAAAKEAAAKEAAAKALEAEAAAKEAAAKEAAAKEAAAKAGGVPWLTQQPLQLTILVPLQEYQEKILSKTALPEDQKQQLKTLFVKYDNLWQHWENQVGHRKIRPHNIATGDYPPRPQKQYPINPKAKPSIQIVIDDLLKQGVLTPQNSTMNTPVYPVPKPDGRWRMVLDYREVNKTIPLTAAQNQHSAGILATIVRQKYKTTLDLANGFWAHPITPESYWLTAFTWQGKQYCWTRLPQGFLNSPALFTADVVDLLKEIPNVQVYVDDIYLSHDDPKEHVQQLEKVFQILLQAGYVVSLKKSEIGQKTVEFLGFNITKEGRGLTDTFKTKLLNITPPKDLKQLQSILGLLNFARNFIPNFAELVQPLYNLIASAKGKYIEWSEENTKQLNMVIEALNTASNLEERLPEQRLVIKVNTSPSAGYVRYYNETGKKPIMYLNYVFSKAELKFSMLEKLLTTMHKALIKAMDLAMGQEILVYSPIVSMTKIQKTPLPERKALPIRWITWMTYLEDPRIQFHYDKTLPELKHIPDVYTSSQSPVKHPSQYEGVFYTDGSAIKSPDPTKSNNAGMGIVHATYKPEYQVLNQWSIPLGNHTAQMAEIAAVEFACKKALKIPGPVLVITDSFYVAESANKELPYWKSNGFVNNKKKPLKHISKWKSIAECLSMKPDITIQHEKGISLQIPVFILKGNALADKLATQGSYVVNAGKRTADGSEFEKRTADGSEFESPKKKAKVE

SEQ ID NO: 7653 - protein, 2211 aa, synthetic construct
MPAAKRVKLDGGDKKYSIGLDIGTNSVGWAVITDEYKVPSKKFKVLGNTDRHSIKKNLIGALLFDSGETAEATRLKRTARRRYTRRKNRICYLQEIFSNEMAKVDDSFFHRLEESFLVEEDKKHERHPIFGNIVDEVAYHEKYPTIYHLRKKLVDSTDKADLRLIYLALAHMIKFRGHFLIEGDLNPDNSDVDKLFIQLVQTYNQLFEENPINASGVDAKAILSARLSKSRRLENLIAQLPGEKKNGLFGNLIALSLGLTPNFKSNFDLAEDAKLQLSKDTYDDDLDNLLAQIGDQYADLFLAAKNLSDAILLSDILRVNTEITKAPLSASMIKRYDEHHQDLTLLKALVRQQLPEKYKEIFFDQSKNGYAGYIDGGASQEEFYKFIKPILEKMDGTEELLVKLNREDLLRKQRTFDNGSIPHQIHLGELHAILRRQEDFYPFLKDNREKIEKILTFRIPYYVGPLARGNSRFAWMTRKSEETITPWNFEEVVDKGASAQSFIERMTNFDKNLPNEKVLPKHSLLYEYFTVYNELTKVKYVTEGMRKPAFLSGEQKKAIVDLLFKTNRKVTVKQLKEDYFKKIECFDSVEISGVEDRFNASLGTYHDLLKIIKDKDFLDNEENEDILEDIVLTLTLFEDREMIEERLKTYAHLFDDKVMKQLKRRRYTGWGRLSRKLINGIRDKQSGKTILDFLKSDGFANRNFMQLIHDDSLTFKEDIQKAQVSGQGDSLHEHIANLAGSPAIKKGILQTVKVVDELVKVMGRHKPENIVIEMARENQTTQKGQKNSRERMKRIEEGIKELGSQILKEHPVENTQLQNEKLYLYYLQNGRDMYVDQELDINRLSDYDVDHIVPQSFLKDDSIDNKVLTRSDKARGKSDNVPSEEVVKKMKNYWRQLLNAKLITQRKFDNLTKAERGGLSELDKAGFIKRQLVETRQITKHVAQILDSRMNTKYDENDKLIREVKVITLKSKLVSDFRKDFQFYKVREINNYHHAHDAYLNAVVGTALIKKYPKLESEFVYGDYKVYDVRKMIAKSEQEIGKATAKYFFYSNIMNFFKTEITLANGEIRKRPLIETNGETGEIVWDKGRDFATVRKVLSMPQVNIVKKTEVQTGGFSKESILPKRNSDKLIARKKDWDPKKYGGFDSPTVAYSVLVVAKVEKGKSKKLKSVKELLGITIMERSSFEKNPIDFLEAKGYKEVKKDLIIKLPKYSLFELENGRKRMLASAGELQKGNELALPSKYVNFLYLASHYEKLKGSPEDNEQKQLFVEQHKHYLDEIIEQISEFSKRVILADANLDKVLSAYNKHRDKPIREQAENIIHLFTLTNLGAPAAFKYFDTTIDRKRYTSTKEVLDATLIHQSITGLYETRIDLSQLGGDGGAEAAAKEAAAKEAAAKEAAAKALEAEAAAKEAAAKEAAAKEAAAKAGGMNPLQLLQPLPAEIKGTKLLAHWNSGATITCIPESFLEDEQPIKKTLIKTIHGEKQQNVYYVTFKVKGRKVEAEVIASPYEYILLSPTDVPWLTQQPLQLTILVPLQEYQEKILSKTALPEDQKQQLKTLFVKYDNLWQHWENQVGHRKIRPHNIATGDYPPRPQKQYPINPKAKPSIQIVIDDLLKQGVLTPQNSTMNTPVYPVPKPDGRWRMVLDYREVNKTIPLTAAQNQHSAGILATIVRQKYKTTLDLANGFWAHPITPESYWLTAFTWQGKQYCWTRLPQGFLNSPALFNADVVDLLKEIPNVQVYVDDIYLSHDDPKEHVQQLEKVFQILLQAGYVVSLKKSEIGQKTVEFLGFNITKEGRGLTDTFKTKLLNITPPKDLKQLQSILGLLNFARNFIPNFAELVQPLYNLIAPAKGKYIEWSEENTKQLNMVIEALNTASNLEERLPEQRLVIKVNTSPSAGYVRYYNETGKKPIMYLNYVFSKAELKFSMLEKLLTTMHKALIKAMDLAMGQEILVYSPIVSMTKIQKTPLPERKALPIRWITWMTYLEDPRIQFHYDKTLPELKHIPDVYTSSQSPVKHPSQYEGVFYTDGSAIKSPDPTKSNNAGMGIVHATYKPEYQVLNQWSIPLGNHTAQMAEIAAVEFACKKALKIPGPVLVITDSFYVAESANKELPYWKSNGFVNNKKKPLKHISKWKSIAECLSMKPDITIQHEKGISLQIPVFILKGNALADKLATQGSYVVNAGKRTADGSEFEKRTADGSEFESPKKKAKVE

SEQ ID NO: 7654 - protein, 2211 aa, synthetic construct
MPAAKRVKLDGGDKKYSIGLDIGTNSVGWAVITDEYKVPSKKFKVLGNTDRHSIKKNLIGALLFDSGETAEATRLKRTARRRYTRRKNRICYLQEIFSNEMAKVDDSFFHRLEESFLVEEDKKHERHPIFGNIVDEVAYHEKYPTIYHLRKKLVDSTDKADLRLIYLALAHMIKFRGHFLIEGDLNPDNSDVDKLFIQLVQTYNQLFEENPINASGVDAKAILSARLSKSRRLENLIAQLPGEKKNGLFGNLIALSLGLTPNFKSNFDLAEDAKLQLSKDTYDDDLDNLLAQIGDQYADLFLAAKNLSDAILLSDILRVNTEITKAPLSASMIKRYDEHHQDLTLLKALVRQQLPEKYKEIFFDQSKNGYAGYIDGGASQEEFYKFIKPILEKMDGTEELLVKLNREDLLRKQRTFDNGSIPHQIHLGELHAILRRQEDFYPFLKDNREKIEKILTFRIPYYVGPLARGNSRFAWMTRKSEETITPWNFEEVVDKGASAQSFIERMTNFDKNLPNEKVLPKHSLLYEYFTVYNELTKVKYVTEGMRKPAFLSGEQKKAIVDLLFKTNRKVTVKQLKEDYFKKIECFDSVEISGVEDRFNASLGTYHDLLKIIKDKDFLDNEENEDILEDIVLTLTLFEDREMIEERLKTYAHLFDDKVMKQLKRRRYTGWGRLSRKLINGIRDKQSGKTILDFLKSDGFANRNFMQLIHDDSLTFKEDIQKAQVSGQGDSLHEHIANLAGSPAIKKGILQTVKVVDELVKVMGRHKPENIVIEMARENQTTQKGQKNSRERMKRIEEGIKELGSQILKEHPVENTQLQNEKLYLYYLQNGRDMYVDQELDINRLSDYDVDHIVPQSFLKDDSIDNKVLTRSDKARGKSDNVPSEEVVKKMKNYWRQLLNAKLITQRKFDNLTKAERGGLSELDKAGFIKRQLVETRQITKHVAQILDSRMNTKYDENDKLIREVKVITLKSKLVSDFRKDFQFYKVREINNYHHAHDAYLNAVVGTALIKKYPKLESEFVYGDYKVYDVRKMIAKSEQEIGKATAKYFFYSNIMNFFKTEITLANGEIRKRPLIETNGETGEIVWDKGRDFATVRKVLSMPQVNIVKKTEVQTGGFSKESILPKRNSDKLIARKKDWDPKKYGGFDSPTVAYSVLVVAKVEKGKSKKLKSVKELLGITIMERSSFEKNPIDFLEAKGYKEVKKDLIIKLPKYSLFELENGRKRMLASAGELQKGNELALPSKYVNFLYLASHYEKLKGSPEDNEQKQLFVEQHKHYLDEIIEQISEFSKRVILADANLDKVLSAYNKHRDKPIREQAENIIHLFTLTNLGAPAAFKYFDTTIDRKRYTSTKEVLDATLIHQSITGLYETRIDLSQLGGDGGAEAAAKEAAAKEAAAKEAAAKALEAEAAAKEAAAKEAAAKEAAAKAGGMNPLQLLQPLPAEIKGTKLLAHWNSGATITCIPESFLEDEQPIKKTLIKTIHGEKQQNVYYVTFKVKGRKVEAEVIASPYEYILLSPTDVPWLTQQPLQLTILVPLQEYQEKILSKTALPEDQKQQLKTLFVKYDNLWQHWENQVGHRKIRPHNIATGDYPPRPQKQYPINPKAKPSIQIVIDDLLKQGVLTPQNSTMNTPVYPVPKPDGRWRMVLDYREVNKTIPLTAAQNQHSAGILATIVRQKYKTTLDLANGFWAHPITPESYWLTAFTWQGKQYCWTRLPQGFLNSPALFNADVVDLLKEIPNVQVYVDDIYLSHDDPKEHVQQLEKVFQILLQAGYVVSLKKSEIGQKTVEFLGFNITKEGRGLTDTFKTKLLNITPPKDLKQLQSILGKLNFARNFIPNFAELVQPLYNLIAPAKGKYIEWSEENTKQLNMVIEALNTASNLEERLPEQRLVIKVNTSPSAGYVRYYNETGKKPIMYLNYVFSKAELKFSMLEKLLTTMHKALIKAMDLAMGQEILVYSPIVSMTKIQKTPLPERKALPIRWITWMTYLEDPRIQFHYDKTLPELKHIPDVYTSSQSPVKHPSQYEGVFYTDGSAIKSPDPTKSNNAGMGIVHATYKPEYQVLNQWSIPLGNHTAQMAEIAAVEFACKKALKIPGPVLVITDSFYVAESANKELPYWKSNGFVNNKKKPLKHISKWKSIAECLSMKPDITIQHEKGISLQIPVFILKGNALADKLATQGSYVVNAGKRTADGSEFEKRTADGSEFESPKKKAKVE

SEQ ID NO: 7655 - protein, 2162 aa, synthetic construct
MPAAKRVKLDGGDKKYSIGLDIGTNSVGWAVITDEYKVPSKKFKVLGNTDRHSIKKNLIGALLFDSGETAEATRLKRTARRRYTRRKNRICYLQEIFSNEMAKVDDSFFHRLEESFLVEEDKKHERHPIFGNIVDEVAYHEKYPTIYHLRKKLVDSTDKADLRLIYLALAHMIKFRGHFLIEGDLNPDNSDVDKLFIQLVQTYNQLFEENPINASGVDAKAILSARLSKSRRLENLIAQLPGEKKNGLFGNLIALSLGLTPNFKSNFDLAEDAKLQLSKDTYDDDLDNLLAQIGDQYADLFLAAKNLSDAILLSDILRVNTEITKAPLSASMIKRYDEHHQDLTLLKALVRQQLPEKYKEIFFDQSKNGYAGYIDGGASQEEFYKFIKPILEKMDGTEELLVKLNREDLLRKQRTFDNGSIPHQIHLGELHAILRRQEDFYPFLKDNREKIEKILTFRIPYYVGPLARGNSRFAWMTRKSEETITPWNFEEVVDKGASAQSFIERMTNFDKNLPNEKVLPKHSLLYEYFTVYNELTKVKYVTEGMRKPAFLSGEQKKAIVDLLFKTNRKVTVKQLKEDYFKKIECFDSVEISGVEDRFNASLGTYHDLLKIIKDKDFLDNEENEDILEDIVLTLTLFEDREMIEERLKTYAHLFDDKVMKQLKRRRYTGWGRLSRKLINGIRDKQSGKTILDFLKSDGFANRNFMQLIHDDSLTFKEDIQKAQVSGQGDSLHEHIANLAGSPAIKKGILQTVKVVDELVKVMGRHKPENIVIEMARENQTTQKGQKNSRERMKRIEEGIKELGSQILKEHPVENTQLQNEKLYLYYLQNGRDMYVDQELDINRLSDYDVDHIVPQSFLKDDSIDNKVLTRSDKARGKSDNVPSEEVVKKMKNYWRQLLNAKLITQRKFDNLTKAERGGLSELDKAGFIKRQLVETRQITKHVAQILDSRMNTKYDENDKLIREVKVITLKSKLVSDFRKDFQFYKVREINNYHHAHDAYLNAVVGTALIKKYPKLESEFVYGDYKVYDVRKMIAKSEQEIGKATAKYFFYSNIMNFFKTEITLANGEIRKRPLIETNGETGEIVWDKGRDFATVRKVLSMPQVNIVKKTEVQTGGFSKESILPKRNSDKLIARKKDWDPKKYGGFDSPTVAYSVLVVAKVEKGKSKKLKSVKELLGITIMERSSFEKNPIDFLEAKGYKEVKKDLIIKLPKYSLFELENGRKRMLASAGELQKGNELALPSKYVNFLYLASHYEKLKGSPEDNEQKQLFVEQHKHYLDEIIEQISEFSKRVILADANLDKVLSAYNKHRDKPIREQAENIIHLFTLTNLGAPAAFKYFDTTIDRKRYTSTKEVLDATLIHQSITGLYETRIDLSQLGGDGGAEAAAKEAAAKEAAAKEAAAKALEAEAAAKEAAAKEAAAKEAAAKAGGLLGRDLLTKLKAQIQFSTEGPQVTWEDRPAMCLVLNLEEEYRLHEKPVPPSIDPSWLQLFPMVWAEKAGMGLANQVPPVVVELKSDASPVAVRQYPMSKEAREGIRPHIQRFLDLGILVPCQSPWNTPLLPVKKPGTNDYRPVQDLREVNKRVQDIHPTVPNPYNLLSSLPPSHTWYSVLDLKDAFFCLKLHPNSQPLFAFEWRDPEKGNTGQLTWTRLPQGFKNSPTLFDEALHRDLASFRALNPQVVMLQYVDDLLVAAPTYRDCKEGTRRLLQELSKLGYRVSAKKAQLCREEVTYLGYLLKGGKRWLTPARKATVMKIPTPTTPRQVREFLGTAGFCRLWIPGFASLAAPLYPLTREKVPFTWTEAHQEAFGRIKEALLSAPALALPDLTKPFALYVDEKEGVARGVLTQTLGPWRRPVAYLSKKLDPVASGWPTCLKAIAAVALLLKDADKLTLGQNVLVIAPHNLESIVRQPPDRWMTNARMTHYQSLLLNERVSFAPPAILNPATLLPVESDDTPIHICSEILAEETGTRPDLRDQPLPGVPAWYTDGSSFIMDGRRQAGAAIVDNKRTVWASNLPEGTSAQKAELIALTQALRLAEGKSINIYTDSRYAFATAHVHGAIYKQRGLLTSAGKDIKNKEEILALLEAIHLPKRVAIIHCPGHQRGTDPVATGNRKADEAAKQAAQSTRILTETTKNAGKRTADGSEFEKRTADGSEFESPKKKAKVE

SEQ ID NO: 7656 - protein, 2253 aa, synthetic construct
MPAAKRVKLDGGDKKYSIGLDIGTNSVGWAVITDEYKVPSKKFKVLGNTDRHSIKKNLIGALLFDSGETAEATRLKRTARRRYTRRKNRICYLQEIFSNEMAKVDDSFFHRLEESFLVEEDKKHERHPIFGNIVDEVAYHEKYPTIYHLRKKLVDSTDKADLRLIYLALAHMIKFRGHFLIEGDLNPDNSDVDKLFIQLVQTYNQLFEENPINASGVDAKAILSARLSKSRRLENLIAQLPGEKKNGLFGNLIALSLGLTPNFKSNFDLAEDAKLQLSKDTYDDDLDNLLAQIGDQYADLFLAAKNLSDAILLSDILRVNTEITKAPLSASMIKRYDEHHQDLTLLKALVRQQLPEKYKEIFFDQSKNGYAGYIDGGASQEEFYKFIKPILEKMDGTEELLVKLNREDLLRKQRTFDNGSIPHQIHLGELHAILRRQEDFYPFLKDNREKIEKILTFRIPYYVGPLARGNSRFAWMTRKSEETITPWNFEEVVDKGASAQSFIERMTNFDKNLPNEKVLPKHSLLYEYFTVYNELTKVKYVTEGMRKPAFLSGEQKKAIVDLLFKTNRKVTVKQLKEDYFKKIECFDSVEISGVEDRFNASLGTYHDLLKIIKDKDFLDNEENEDILEDIVLTLTLFEDREMIEERLKTYAHLFDDKVMKQLKRRRYTGWGRLSRKLINGIRDKQSGKTILDFLKSDGFANRNFMQLIHDDSLTFKEDIQKAQVSGQGDSLHEHIANLAGSPAIKKGILQTVKVVDELVKVMGRHKPENIVIEMARENQTTQKGQKNSRERMKRIEEGIKELGSQILKEHPVENTQLQNEKLYLYYLQNGRDMYVDQELDINRLSDYDVDHIVPQSFLKDDSIDNKVLTRSDKARGKSDNVPSEEVVKKMKNYWRQLLNAKLITQRKFDNLTKAERGGLSELDKAGFIKRQLVETRQITKHVAQILDSRMNTKYDENDKLIREVKVITLKSKLVSDFRKDFQFYKVREINNYHHAHDAYLNAVVGTALIKKYPKLESEFVYGDYKVYDVRKMIAKSEQEIGKATAKYFFYSNIMNFFKTEITLANGEIRKRPLIETNGETGEIVWDKGRDFATVRKVLSMPQVNIVKKTEVQTGGFSKESILPKRNSDKLIARKKDWDPKKYGGFDSPTVAYSVLVVAKVEKGKSKKLKSVKELLGITIMERSSFEKNPIDFLEAKGYKEVKKDLIIKLPKYSLFELENGRKRMLASAGELQKGNELALPSKYVNFLYLASHYEKLKGSPEDNEQKQLFVEQHKHYLDEIIEQISEFSKRVILADANLDKVLSAYNKHRDKPIREQAENIIHLFTLTNLGAPAAFKYFDTTIDRKRYTSTKEVLDATLIHQSITGLYETRIDLSQLGGDGGAEAAAKEAAAKEAAAKEAAAKALEAEAAAKEAAAKEAAAKEAAAKAGGTLGDQGSRGSDPLPEPRVTLTVEGIPTEFLVNTGAEHSVLTKPMGKMGSKRTVVAGATGSKVYPWTTKRLLKIGQKQVTHSFLVIPECPAPLLGRDLLTKLKAQIQFSTEGPQVTWEDRPAMCLVLNLEEEYRLHEKPVPPSIDPSWLQLFPMVWAEKAGMGLANQVPPVVVELKSDASPVAVRQYPMSKEAREGIRPHIQRFLDLGILVPCQSPWNTPLLPVKKPGTNDYRPVQDLREVNKRVQDIHPTVPNPYNLLSSLPPSHTWYSVLDLKDAFFCLKLHPNSQPLFAFEWRDPEKGNTGQLTWTRLPQGFKNSPTLFNEALHRDLASFRALNPQVVMLQYVDDLLVAAPTYRDCKEGTRRLLQELSKLGYRVSAKKAQLCREEVTYLGYLLKGGKRWLTPARKATVMKIPTPTTPRQVREFLGTAGFCRLWIPGFASLAAPLYPLTRPKVPFTWTEAHQEAFGRIKEALLSAPALALPDLTKPFALYVDEKEGVARGVLTQTLGPWRRPVAYLSKKLDPVASGWPTCLKAIAAVALLLKDADKLTLGQNVLVIAPHNLESIVRQPPDRWMTNARMTHYQSLLLNERVSFAPPAILNPATLLPVESDDTPIHICSEILAEETGTRPDLRDQPLPGVPAWYTDGSSFIMDGRRQAGAAIVDNKRTVWASNLPEGTSAQKAELIALTQALRLAEGKSINIYTDSRYAFATAHVHGAIYKQRGWLTSAGKDIKNKEEILALLEAIHLPKRVAIIHCPGHQRGTDPVATGNRKADEAAKQAAQSTRILTETTKNAGKRTADGSEFEKRTADGSEFESPKKKAKVE

SEQ ID NO: 7657 - protein, 2131 aa, synthetic construct
MPAAKRVKLDGGDKKYSIGLDIGTNSVGWAVITDEYKVPSKKFKVLGNTDRHSIKKNLIGALLFDSGETAEATRLKRTARRRYTRRKNRICYLQEIFSNEMAKVDDSFFHRLEESFLVEEDKKHERHPIFGNIVDEVAYHEKYPTIYHLRKKLVDSTDKADLRLIYLALAHMIKFRGHFLIEGDLNPDNSDVDKLFIQLVQTYNQLFEENPINASGVDAKAILSARLSKSRRLENLIAQLPGEKKNGLFGNLIALSLGLTPNFKSNFDLAEDAKLQLSKDTYDDDLDNLLAQIGDQYADLFLAAKNLSDAILLSDILRVNTEITKAPLSASMIKRYDEHHQDLTLLKALVRQQLPEKYKEIFFDQSKNGYAGYIDGGASQEEFYKFIKPILEKMDGTEELLVKLNREDLLRKQRTFDNGSIPHQIHLGELHAILRRQEDFYPFLKDNREKIEKILTFRIPYYVGPLARGNSRFAWMTRKSEETITPWNFEEVVDKGASAQSFIERMTNFDKNLPNEKVLPKHSLLYEYFTVYNELTKVKYVTEGMRKPAFLSGEQKKAIVDLLFKTNRKVTVKQLKEDYFKKIECFDSVEISGVEDRFNASLGTYHDLLKIIKDKDFLDNEENEDILEDIVLTLTLFEDREMIEERLKTYAHLFDDKVMKQLKRRRYTGWGRLSRKLINGIRDKQSGKTILDFLKSDGFANRNFMQLIHDDSLTFKEDIQKAQVSGQGDSLHEHIANLAGSPAIKKGILQTVKVVDELVKVMGRHKPENIVIEMARENQTTQKGQKNSRERMKRIEEGIKELGSQILKEHPVENTQLQNEKLYLYYLQNGRDMYVDQELDINRLSDYDVDHIVPQSFLKDDSIDNKVLTRSDKARGKSDNVPSEEVVKKMKNYWRQLLNAKLITQRKFDNLTKAERGGLSELDKAGFIKRQLVETRQITKHVAQILDSRMNTKYDENDKLIREVKVITLKSKLVSDFRKDFQFYKVREINNYHHAHDAYLNAVVGTALIKKYPKLESEFVYGDYKVYDVRKMIAKSEQEIGKATAKYFFYSNIMNFFKTEITLANGEIRKRPLIETNGETGEIVWDKGRDFATVRKVLSMPQVNIVKKTEVQTGGFSKESILPKRNSDKLIARKKDWDPKKYGGFDSPTVAYSVLVVAKVEKGKSKKLKSVKELLGITIMERSSFEKNPIDFLEAKGYKEVKKDLIIKLPKYSLFELENGRKRMLASAGELQKGNELALPSKYVNFLYLASHYEKLKGSPEDNEQKQLFVEQHKHYLDEIIEQISEFSKRVILADANLDKVLSAYNKHRDKPIREQAENIIHLFTLTNLGAPAAFKYFDTTIDRKRYTSTKEVLDATLIHQSITGLYETRIDLSQLGGDGGAEAAAKEAAAKEAAAKEAAAKALEAEAAAKEAAAKEAAAKEAAAKAGGTLNLEDEYRLYETSAEPEVSPGSTWLSDFPQAWAETGGMGLAVRQAPLIIPLKATSTPVSIKQYPMSQEAKLGIKPHIQRLLDQGILVPCQSPWNTPLLPVKKPGTNDYRPVQDLREVNKRVEDIHPTVPNPYNLLSGLPPSHRWYTVLDLKDAFFCLRLHPTSQPLFAFEWRDPGMGISGQLTWTRLPQGFKNSPTLFNEALHRDLADFRIQHPDLILLQYVDDILLAATSELDCQQGTRALLLTLGNLGYRASAKKAQLCQKQVKYLGYLLKEGQRWLTEARKETVMGQPTPKTPRQLREFLGTAGFCRLWIPGFAEMAAPLYPLTKPGTLFNWGPDQQKAYQEIKQALLTAPALGLPDLTKPFELFVDEKQGYAKGVLTQKLGPWRRPVAYLSKKLDPVAAGWPPCLRMVAAIAVLRKDAGKLTMGQPLVILAPHAVEALVKQPPDRWLSNARMTHYQAMLLDTDRVQFGPVVALNPATLLPLPEEGAPHDCLEILAETHGTRPDLTDQPIPDADHTWYTDGSSFLQEGQRKAGAAVTTETEVIWARALPAGTSAQRAELIALTQALKMAEGKRLNVYTDSRYAFATAHIHGEIYRRRGWLTSEGREIKNKSEILALLKALFLPKRLSIIHCLGHQKGDSAEARGNRLADQAAREAAIKTPPDTSTLLAGKRTADGSEFEKRTADGSEFESPKKKAKVE

SEQ ID NO: 7658 - protein, 2131 aa, synthetic construct
MPAAKRVKLDGGDKKYSIGLDIGTNSVGWAVITDEYKVPSKKFKVLGNTDRHSIKKNLIGALLFDSGETAEATRLKRTARRRYTRRKNRICYLQEIFSNEMAKVDDSFFHRLEESFLVEEDKKHERHPIFGNIVDEVAYHEKYPTIYHLRKKLVDSTDKADLRLIYLALAHMIKFRGHFLIEGDLNPDNSDVDKLFIQLVQTYNQLFEENPINASGVDAKAILSARLSKSRRLENLIAQLPGEKKNGLFGNLIALSLGLTPNFKSNFDLAEDAKLQLSKDTYDDDLDNLLAQIGDQYADLFLAAKNLSDAILLSDILRVNTEITKAPLSASMIKRYDEHHQDLTLLKALVRQQLPEKYKEIFFDQSKNGYAGYIDGGASQEEFYKFIKPILEKMDGTEELLVKLNREDLLRKQRTFDNGSIPHQIHLGELHAILRRQEDFYPFLKDNREKIEKILTFRIPYYVGPLARGNSRFAWMTRKSEETITPWNFEEVVDKGASAQSFIERMTNFDKNLPNEKVLPKHSLLYEYFTVYNELTKVKYVTEGMRKPAFLSGEQKKAIVDLLFKTNRKVTVKQLKEDYFKKIECFDSVEISGVEDRFNASLGTYHDLLKIIKDKDFLDNEENEDILEDIVLTLTLFEDREMIEERLKTYAHLFDDKVMKQLKRRRYTGWGRLSRKLINGIRDKQSGKTILDFLKSDGFANRNFMQLIHDDSLTFKEDIQKAQVSGQGDSLHEHIANLAGSPAIKKGILQTVKVVDELVKVMGRHKPENIVIEMARENQTTQKGQKNSRERMKRIEEGIKELGSQILKEHPVENTQLQNEKLYLYYLQNGRDMYVDQELDINRLSDYDVDHIVPQSFLKDDSIDNKVLTRSDKARGKSDNVPSEEVVKKMKNYWRQLLNAKLITQRKFDNLTKAERGGLSELDKAGFIKRQLVETRQITKHVAQILDSRMNTKYDENDKLIREVKVITLKSKLVSDFRKDFQFYKVREINNYHHAHDAYLNAVVGTALIKKYPKLESEFVYGDYKVYDVRKMIAKSEQEIGKATAKYFFYSNIMNFFKTEITLANGEIRKRPLIETNGETGEIVWDKGRDFATVRKVLSMPQVNIVKKTEVQTGGFSKESILPKRNSDKLIARKKDWDPKKYGGFDSPTVAYSVLVVAKVEKGKSKKLKSVKELLGITIMERSSFEKNPIDFLEAKGYKEVKKDLIIKLPKYSLFELENGRKRMLASAGELQKGNELALPSKYVNFLYLASHYEKLKGSPEDNEQKQLFVEQHKHYLDEIIEQISEFSKRVILADANLDKVLSAYNKHRDKPIREQAENIIHLFTLTNLGAPAAFKYFDTTIDRKRYTSTKEVLDATLIHQSITGLYETRIDLSQLGGDGGAEAAAKEAAAKEAAAKEAAAKALEAEAAAKEAAAKEAAAKEAAAKAGGTLNIEDEYRLHETSKEPDVSLGSTWLSDFPQAWAETGGMGLAVRQAPLIIPLKATSTPVSIKQYPMSQEARLGIKPHIQRLLDQGILVPCQSPWNTPLLPVKKPGTNDYRPVQDLREVNKRVEDIHPTVPNPYNLLSGLPPSHQWYTVLDLKDAFFCLRLHPTSQPLFAFEWRDPEMGISGQLTWTRLPQGFKNSPTLFNEALHRDLAGFRIQHPDLILLQYVDDLLLAATSELDCQQGTRALLQTLGDLGYRASAKKAQICQKQVKYLGYLLKEGQRWLTEARKETVMGQPIPKTPRQLREFLGTAGFCRLWIPGFAEMAAPLYPLTKPGTLFNWGPDQQKAFQEIKQALLTAPALGLPDLTKPFELFVDEKQGYAKGVLTQKLGPWRRPVAYLSKKLDPVAAGWPPCLRMVAAIAVLTKDAGKLTMGQPLVILAPHAVEALVKQPPDRWLSNARMTHYQALLLDTDRVQFGPVVALNPATLLPLPEEGLQHDCLDILAEAHGTRSDLMDQPLPDADHTWYTDGSSFLQEGQRKAGAAVTTETEVIWARALPAGTSAQRAELIALTQALKMAEGKKLNVYTDSRYAFATAHIHGEIYRRRGWLTSEGKEIKNKDEILALLKALFLPKRLSIIHCPGHQKGNSAEARGNRMADQAAREVATRETPETSTLLAGKRTADGSEFEKRTADGSEFESPKKKAKVE

SEQ ID NO: 7659 - protein, 2131 aa, synthetic construct
MPAAKRVKLDGGDKKYSIGLDIGTNSVGWAVITDEYKVPSKKFKVLGNTDRHSIKKNLIGALLFDSGETAEATRLKRTARRRYTRRKNRICYLQEIFSNEMAKVDDSFFHRLEESFLVEEDKKHERHPIFGNIVDEVAYHEKYPTIYHLRKKLVDSTDKADLRLIYLALAHMIKFRGHFLIEGDLNPDNSDVDKLFIQLVQTYNQLFEENPINASGVDAKAILSARLSKSRRLENLIAQLPGEKKNGLFGNLIALSLGLTPNFKSNFDLAEDAKLQLSKDTYDDDLDNLLAQIGDQYADLFLAAKNLSDAILLSDILRVNTEITKAPLSASMIKRYDEHHQDLTLLKALVRQQLPEKYKEIFFDQSKNGYAGYIDGGASQEEFYKFIKPILEKMDGTEELLVKLNREDLLRKQRTFDNGSIPHQIHLGELHAILRRQEDFYPFLKDNREKIEKILTFRIPYYVGPLARGNSRFAWMTRKSEETITPWNFEEVVDKGASAQSFIERMTNFDKNLPNEKVLPKHSLLYEYFTVYNELTKVKYVTEGMRKPAFLSGEQKKAIVDLLFKTNRKVTVKQLKEDYFKKIECFDSVEISGVEDRFNASLGTYHDLLKIIKDKDFLDNEENEDILEDIVLTLTLFEDREMIEERLKTYAHLFDDKVMKQLKRRRYTGWGRLSRKLINGIRDKQSGKTILDFLKSDGFANRNFMQLIHDDSLTFKEDIQKAQVSGQGDSLHEHIANLAGSPAIKKGILQTVKVVDELVKVMGRHKPENIVIEMARENQTTQKGQKNSRERMKRIEEGIKELGSQILKEHPVENTQLQNEKLYLYYLQNGRDMYVDQELDINRLSDYDVDHIVPQSFLKDDSIDNKVLTRSDKARGKSDNVPSEEVVKKMKNYWRQLLNAKLITQRKFDNLTKAERGGLSELDKAGFIKRQLVETRQITKHVAQILDSRMNTKYDENDKLIREVKVITLKSKLVSDFRKDFQFYKVREINNYHHAHDAYLNAVVGTALIKKYPKLESEFVYGDYKVYDVRKMIAKSEQEIGKATAKYFFYSNIMNFFKTEITLANGEIRKRPLIETNGETGEIVWDKGRDFATVRKVLSMPQVNIVKKTEVQTGGFSKESILPKRNSDKLIARKKDWDPKKYGGFDSPTVAYSVLVVAKVEKGKSKKLKSVKELLGITIMERSSFEKNPIDFLEAKGYKEVKKDLIIKLPKYSLFELENGRKRMLASAGELQKGNELALPSKYVNFLYLASHYEKLKGSPEDNEQKQLFVEQHKHYLDEIIEQISEFSKRVILADANLDKVLSAYNKHRDKPIREQAENIIHLFTLTNLGAPAAFKYFDTTIDRKRYTSTKEVLDATLIHQSITGLYETRIDLSQLGGDGGAEAAAKEAAAKEAAAKEAAAKALEAEAAAKEAAAKEAAAKEAAAKAGGTLNIEDEYRLHETSKGPDVPLGSTWLSDFPQAWAETGGMGLAFRQAPLIISLKATSTPVSIKQYPMSQEARLGIKPHIQRLLDQGILVPCQSPWNTPLLPVKKPGTNDYRPVQDLREVNKRVEDIHPTVPNPYNLLSGLPPSHQWYTVLDLKDAFFCLRLHPTSQSLFAFEWKDPEMGISGQLTWTRLPQGFKNSPTLFNEALHRDLADFRIQHPDLILLQYVDDLLLAATSELDCQQGTRALLQTLGDLGYRASAKKAQICQKQVKYLGYLLKEGQRWLTEARKETVMGQPTPKTPRQLREFLGKAGLCRLFIPGFAEMAAPLYPLTKPGTLFKWGPDQQKAYQEIKQALLTAPALGLPDLTKPFELFVDEKQGYAKGVLTQKLGPWRRPVAYLSKKLDPVAAGWPPCLRMVAAIAVLTKDVGKLTMGQPLVILAPHAVEALVKQPPDRWLSNARMTHYQALLLDTDRVQFGPIVALNPATLLPLPEEGLQHDCLDILAEAHGTRPDLTDQPLPDADHTWYTDGSSFLQEGQRRAGAAVTTETEVIWAKALPAGTSAQRAELIALTQALKMAAGKKLNVYTDSRYAFATAHIHGEIYRRRGWLTSEGKEIKNKDEILALLKALFLPKRLSIIHCPGHQKGNHAEARGNRMADQAAREVATRETPETSTLLAGKRTADGSEFEKRTADGSEFESPKKKAKVE

SEQ ID NO: 7660 - protein, 2131 aa, synthetic construct; identical to SEQ ID NO: 4540

SEQ ID NO: 7661 - protein, 2151 aa, synthetic construct
MPAAKRVKLDGGDKKYSIGLDIGTNSVGWAVITDEYKVPSKKFKVLGNTDRHSIKKNLIGALLFDSGETAEATRLKRTARRRYTRRKNRICYLQEIFSNEMAKVDDSFFHRLEESFLVEEDKKHERHPIFGNIVDEVAYHEKYPTIYHLRKKLVDSTDKADLRLIYLALAHMIKFRGHFLIEGDLNPDNSDVDKLFIQLVQTYNQLFEENPINASGVDAKAILSARLSKSRRLENLIAQLPGEKKNGLFGNLIALSLGLTPNFKSNFDLAEDAKLQLSKDTYDDDLDNLLAQIGDQYADLFLAAKNLSDAILLSDILRVNTEITKAPLSASMIKRYDEHHQDLTLLKALVRQQLPEKYKEIFFDQSKNGYAGYIDGGASQEEFYKFIKPILEKMDGTEELLVKLNREDLLRKQRTFDNGSIPHQIHLGELHAILRRQEDFYPFLKDNREKIEKILTFRIPYYVGPLARGNSRFAWMTRKSEETITPWNFEEVVDKGASAQSFIERMTNFDKNLPNEKVLPKHSLLYEYFTVYNELTKVKYVTEGMRKPAFLSGEQKKAIVDLLFKTNRKVTVKQLKEDYFKKIECFDSVEISGVEDRFNASLGTYHDLLKIIKDKDFLDNEENEDILEDIVLTLTLFEDREMIEERLKTYAHLFDDKVMKQLKRRRYTGWGRLSRKLINGIRDKQSGKTILDFLKSDGFANRNFMQLIHDDSLTFKEDIQKAQVSGQGDSLHEHIANLAGSPAIKKGILQTVKVVDELVKVMGRHKPENIVIEMARENQTTQKGQKNSRERMKRIEEGIKELGSQILKEHPVENTQLQNEKLYLYYLQNGRDMYVDQELDINRLSDYDVDHIVPQSFLKDDSIDNKVLTRSDKARGKSDNVPSEEVVKKMKNYWRQLLNAKLITQRKFDNLTKAERGGLSELDKAGFIKRQLVETRQITKHVAQILDSRMNTKYDENDKLIREVKVITLKSKLVSDFRKDFQFYKVREINNYHHAHDAYLNAVVGTALIKKYPKLESEFVYGDYKVYDVRKMIAKSEQEIGKATAKYFFYSNIMNFFKTEITLANGEIRKRPLIETNGETGEIVWDKGRDFATVRKVLSMPQVNIVKKTEVQTGGFSKESILPKRNSDKLIARKKDWDPKKYGGFDSPTVAYSVLVVAKVEKGKSKKLKSVKELLGITIMERSSFEKNPIDFLEAKGYKEVKKDLIIKLPKYSLFELENGRKRMLASAGELQKGNELALPSKYVNFLYLASHYEKLKGSPEDNEQKQLFVEQHKHYLDEIIEQISEFSKRVILADANLDKVLSAYNKHRDKPIREQAENIIHLFTLTNLGAPAAFKYFDTTIDRKRYTSTKEVLDATLIHQSITGLYETRIDLSQLGGDGGAEAAAKEAAAKEAAAKEAAAKALEAEAAAKEAAAKEAAAKEAAAKAGGWVQEISDSRPMLHIYLNGRRFLGLLNTGADKTCIAGRDWPANWPIHQTESSLQGLGMACGVARSSQPLRWQHEDKSGIIHPFVIPTLPFTLWGRDIMKDIKVRLMTDSPDDSQDLMIGAIESNLFADQISWKSDQPVWLNQWPLKQEKLQALQQLVTEQLQLGHLEESNSPWNTPVFVIKKKSGKWRLLQDLRAVNATMHDMGALQPGLPSPVAVPKGWEIIIIDLQDCFFNIKLHPEDCKRFAFSVPSPNFKRPYQRFQWKVLPQGMKNSPTLCQKFVDKAILTVRDKYQDSYIVHYMDDILLAHPSRSIVDEILTSMIQALNKHGLVVSTEKIQKYDNLKYLGTHIQGDSVSYQKLQIRTDKLRTLNDFQKLLGNINWIRPFLKLTTGELKPLFEILNPDSNPISTRKLTPEACKALQLMNERLSTARVKRLDLSQPWSLCILKTEYTPTACLWQDGVVEWIHLPHISPKVITPYDIFCTQLIIKGRHRSKELFSKDPDYIVVPYTKVQFDLLLQEKEDWPISLLGFLGEVHFHLPKDPLLTFTLQTAIIFPHMTSTTPLEKGIVIFTDGSANGRSVTYIQGREPIIKENTQNTAQQAEIVAVITAFEEVSQPFNLYTDSKYVTGLFPEIETATLSPRTKIYTELKHLQRLIHKRQEKFYIGHIRGHTGLPGPLAQGNAYADSLTRILTAGKRTADGSEFEKRTADGSEFESPKKKAKVE

SEQ ID NO: 7662 - protein, 2122 aa, synthetic construct
MPAAKRVKLDGGDKKYSIGLDIGTNSVGWAVITDEYKVPSKKFKVLGNTDRHSIKKNLIGALLFDSGETAEATRLKRTARRRYTRRKNRICYLQEIFSNEMAKVDDSFFHRLEESFLVEEDKKHERHPIFGNIVDEVAYHEKYPTIYHLRKKLVDSTDKADLRLIYLALAHMIKFRGHFLIEGDLNPDNSDVDKLFIQLVQTYNQLFEENPINASGVDAKAILSARLSKSRRLENLIAQLPGEKKNGLFGNLIALSLGLTPNFKSNFDLAEDAKLQLSKDTYDDDLDNLLAQIGDQYADLFLAAKNLSDAILLSDILRVNTEITKAPLSASMIKRYDEHHQDLTLLKALVRQQLPEKYKEIFFDQSKNGYAGYIDGGASQEEFYKFIKPILEKMDGTEELLVKLNREDLLRKQRTFDNGSIPHQIHLGELHAILRRQEDFYPFLKDNREKIEKILTFRIPYYVGPLARGNSRFAWMTRKSEETITPWNFEEVVDKGASAQSFIERMTNFDKNLPNEKVLPKHSLLYEYFTVYNELTKVKYVTEGMRKPAFLSGEQKKAIVDLLFKTNRKVTVKQLKEDYFKKIECFDSVEISGVEDRFNASLGTYHDLLKIIKDKDFLDNEENEDILEDIVLTLTLFEDREMIEERLKTYAHLFDDKVMKQLKRRRYTGWGRLSRKLINGIRDKQSGKTILDFLKSDGFANRNFMQLIHDDSLTFKEDIQKAQVSGQGDSLHEHIANLAGSPAIKKGILQTVKVVDELVKVMGRHKPENIVIEMARENQTTQKGQKNSRERMKRIEEGIKELGSQILKEHPVENTQLQNEKLYLYYLQNGRDMYVDQELDINRLSDYDVDHIVPQSFLKDDSIDNKVLTRSDKARGKSDNVPSEEVVKKMKNYWRQLLNAKLITQRKFDNLTKAERGGLSELDKAGFIKRQLVETRQITKHVAQILDSRMNTKYDENDKLIREVKVITLKSKLVSDFRKDFQFYKVREINNYHHAHDAYLNAVVGTALIKKYPKLESEFVYGDYKVYDVRKMIAKSEQEIGKATAKYFFYSNIMNFFKTEITLANGEIRKRPLIETNGETGEIVWDKGRDFATVRKVLSMPQVNIVKKTEVQTGGFSKESILPKRNSDKLIARKKDWDPKKYGGFDSPTVAYSVLVVAKVEKGKSKKLKSVKELLGITIMERSSFEKNPIDFLEAKGYKEVKKDLIIKLPKYSLFELENGRKRMLASAGELQKGNELALPSKYVNFLYLASHYEKLKGSPEDNEQKQLFVEQHKHYLDEIIEQISEFSKRVILADANLDKVLSAYNKHRDKPIREQAENIIHLFTLTNLGAPAAFKYFDTTIDRKRYTSTKEVLDATLIHQSITGLYETRIDLSQLGGDGGAEAAAKEAAAKEAAAKEAAAKALEAEAAAKEAAAKEAAAKEAAAKAGGVPWLMKKPLQLTVLVPLHEYQERLLQQTALPKEQKELLQKLFLKYDALWQHWENQVGHRRIKPHNIATGTLAPRPQKQYPINPKAKPSIQIVIDDLLKQGVLIQQNSTMNTPVYPVPKPDGKWRMVLDYREVNKTIPLIAAQNQHSAGILSSIYRGKYKTTLDLTNGFWAHPITPESYWLTAFTWQGKQYCWTRLPQGFLNSPALFTADVVDLLKEIPNVQAYVDDIYISHDDPQEHLEQLEKIFSILLNAGYVVSLKKSEIAQREVEFLGFNITKEGRGLTDTFKQKLLNITPPKDLKQLQSILGLLNFARNFIPNYSELVKPLYTIVANANGKFISWTEDNSNQLQHIISVLNQADNLEERNPETRLIIKVNSSPSAGYIRYYNEGSKRPIMYVNYIFSKAEAKFTQTEKLLTTMHKGLIKAMDLAMGQEILVYSPIVSMTKIQRTPLPERKALPVRWITWMTYLEDPRIQFHYDKSLPELQQIPNVTEDVIAKTKHPSEFAMVFYTDGSAIKHPDVNKSHSAGMGIAQVQFIPEYKIVHQWSIPLGDHTAQLAEIAAVEFACKKALKISGPVLIVTDSFYVAESANKELPYWKSNGFLNNKKKPLRHVSKWKSIAECLQLKPDIIIMHEKGHQQPMTTLHTEGNNLADKLATQGSYVVHAGKRTADGSEFEKRTADGSEFESPKKKAKVE

SEQ ID NO: 7663 - protein, 2122 aa, synthetic construct
MPAAKRVKLDGGDKKYSIGLDIGTNSVGWAVITDEYKVPSKKFKVLGNTDRHSIKKNLIGALLFDSGETAEATRLKRTARRRYTRRKNRICYLQEIFSNEMAKVDDSFFHRLEESFLVEEDKKHERHPIFGNIVDEVAYHEKYPTIYHLRKKLVDSTDKADLRLIYLALAHMIKFRGHFLIEGDLNPDNSDVDKLFIQLVQTYNQLFEENPINASGVDAKAILSARLSKSRRLENLIAQLPGEKKNGLFGNLIALSLGLTPNFKSNFDLAEDAKLQLSKDTYDDDLDNLLAQIGDQYADLFLAAKNLSDAILLSDILRVNTEITKAPLSASMIKRYDEHHQDLTLLKALVRQQLPEKYKEIFFDQSKNGYAGYIDGGASQEEFYKFIKPILEKMDGTEELLVKLNREDLLRKQRTFDNGSIPHQIHLGELHAILRRQEDFYPFLKDNREKIEKILTFRIPYYVGPLARGNSRFAWMTRKSEETITPWNFEEVVDKGASAQSFIERMTNFDKNLPNEKVLPKHSLLYEYFTVYNELTKVKYVTEGMRKPAFLSGEQKKAIVDLLFKTNRKVTVKQLKEDYFKKIECFDSVEISGVEDRFNASLGTYHDLLKIIKDKDFLDNEENEDILEDIVLTLTLFEDREMIEERLKTYAHLFDDKVMKQLKRRRYTGWGRLSRKLINGIRDKQSGKTILDFLKSDGFANRNFMQLIHDDSLTFKEDIQKAQVSGQGDSLHEHIANLAGSPAIKKGILQTVKVVDELVKVMGRHKPENIVIEMARENQTTQKGQKNSRERMKRIEEGIKELGSQILKEHPVENTQLQNEKLYLYYLQNGRDMYVDQELDINRLSDYDVDHIVPQSFLKDDSIDNKVLTRSDKARGKSDNVPSEEVVKKMKNYWRQLLNAKLITQRKFDNLTKAERGGLSELDKAGFIKRQLVETRQITKHVAQILDSRMNTKYDENDKLIREVKVITLKSKLVSDFRKDFQFYKVREINNYHHAHDAYLNAVVGTALIKKYPKLESEFVYGDYKVYDVRKMIAKSEQEIGKATAKYFFYSNIMNFFKTEITLANGEIRKRPLIETNGETGEIVWDKGRDFATVRKVLSMPQVNIVKKTEVQTGGFSKESILPKRNSDKLIARKKDWDPKKYGGFDSPTVAYSVLVVAKVEKGKSKKLKSVKELLGITIMERSSFEKNPIDFLEAKGYKEVKKDLIIKLPKYSLFELENGRKRMLASAGELQKGNELALPSKYVNFLYLASHYEKLKGSPEDNEQKQLFVEQHKHYLDEIIEQISEFSKRVILADANLDKVLSAYNKHRDKPIREQAENIIHLFTLTNLGAPAAFKYFDTTIDRKRYTSTKEVLDATLIHQSITGLYETRIDLSQLGGDGGAEAAAKEAAAKEAAAKEAAAKALEAEAAAKEAAAKEAAAKEAAAKAGGVPWLMKKPLQLTVLVPLHEYQERLLQQTALPKEQKELLQKLFLKYDALWQHWENQVGHRRIKPHNIATGTLAPRPQKQYPINPKAKPSIQIVIDDLLKQGVLIQQNSTMNTPVYPVPKPDGKWRMVLDYREVNKTIPLIAAQNQHSAGILSSIYRGKYKTTLDLTNGFWAHPITPESYWLTAFTWQGKQYCWTRLPQGFLNSPALFNADVVDLLKEIPNVQAYVDDIYISHDDPQEHLEQLEKIFSILLNAGYVVSLKKSEIAQREVEFLGFNITKEGRGLTDTFKQKLLNITPPKDLKQLQSILGLLNFARNFIPNYSELVKPLYTIVAPANGKFISWTEDNSNQLQHIISVLNQADNLEERNPETRLIIKVNSSPSAGYIRYYNEGSKRPIMYVNYIFSKAEAKFTQTEKLLTTMHKGLIKAMDLAMGQEILVYSPIVSMTKIQRTPLPERKALPVRWITWMTYLEDPRIQFHYDKSLPELQQIPNVTEDVIAKTKHPSEFAMVFYTDGSAIKHPDVNKSHSAGMGIAQVQFIPEYKIVHQWSIPLGDHTAQLAEIAAVEFACKKALKISGPVLIVTDSFYVAESANKELPYWKSNGFLNNKKKPLRHVSKWKSIAECLQLKPDIIIMHEKGHQQPMTTLHTEGNNLADKLATQGSYVVHAGKRTADGSEFEKRTADGSEFESPKKKAKVE

SEQ ID NO: 7664 - protein, 2122 aa, synthetic construct
MPAAKRVKLDGGDKKYSIGLDIGTNSVGWAVITDEYKVPSKKFKVLGNTDRHSIKKNLIGALLFDSGETAEATRLKRTARRRYTRRKNRICYLQEIFSNEMAKVDDSFFHRLEESFLVEEDKKHERHPIFGNIVDEVAYHEKYPTIYHLRKKLVDSTDKADLRLIYLALAHMIKFRGHFLIEGDLNPDNSDVDKLFIQLVQTYNQLFEENPINASGVDAKAILSARLSKSRRLENLIAQLPGEKKNGLFGNLIALSLGLTPNFKSNFDLAEDAKLQLSKDTYDDDLDNLLAQIGDQYADLFLAAKNLSDAILLSDILRVNTEITKAPLSASMIKRYDEHHQDLTLLKALVRQQLPEKYKEIFFDQSKNGYAGYIDGGASQEEFYKFIKPILEKMDGTEELLVKLNREDLLRKQRTFDNGSIPHQIHLGELHAILRRQEDFYPFLKDNREKIEKILTFRIPYYVGPLARGNSRFAWMTRKSEETITPWNFEEVVDKGASAQSFIERMTNFDKNLPNEKVLPKHSLLYEYFTVYNELTKVKYVTEGMRKPAFLSGEQKKAIVDLLFKTNRKVTVKQLKEDYFKKIECFDSVEISGVEDRFNASLGTYHDLLKIIKDKDFLDNEENEDILEDIVLTLTLFEDREMIEERLKTYAHLFDDKVMKQLKRRRYTGWGRLSRKLINGIRDKQSGKTILDFLKSDGFANRNFMQLIHDDSLTFKEDIQKAQVSGQGDSLHEHIANLAGSPAIKKGILQTVKVVDELVKVMGRHKPENIVIEMARENQTTQKGQKNSRERMKRIEEGIKELGSQILKEHPVENTQLQNEKLYLYYLQNGRDMYVDQELDINRLSDYDVDHIVPQSFLKDDSIDNKVLTRSDKARGKSDNVPSEEVVKKMKNYWRQLLNAKLITQRKFDNLTKAERGGLSELDKAGFIKRQLVETRQITKHVAQILDSRMNTKYDENDKLIREVKVITLKSKLVSDFRKDFQFYKVREINNYHHAHDAYLNAVVGTALIKKYPKLESEFVYGDYKVYDVRKMIAKSEQEIGKATAKYFFYSNIMNFFKTEITLANGEIRKRPLIETNGETGEIVWDKGRDFATVRKVLSMPQVNIVKKTEVQTGGFSKESILPKRNSDKLIARKKDWDPKKYGGFDSPTVAYSVLVVAKVEKGKSKKLKSVKELLGITIMERSSFEKNPIDFLEAKGYKEVKKDLIIKLPKYSLFELENGRKRMLASAGELQKGNELALPSKYVNFLYLASHYEKLKGSPEDNEQKQLFVEQHKHYLDEIIEQISEFSKRVILADANLDKVLSAYNKHRDKPIREQAENIIHLFTLTNLGAPAAFKYFDTTIDRKRYTSTKEVLDATLIHQSITGLYETRIDLSQLGGDGGAEAAAKEAAAKEAAAKEAAAKALEAEAAAKEAAAKEAAAKEAAAKAGGVPWLMKKPLQLTVLVPLHEYQERLLQQTALPKEQKELLQKLFLKYDALWQHWENQVGHRRIKPHNIATGTLAPRPQKQYPINPKAKPSIQIVIDDLLKQGVLIQQNSTMNTPVYPVPKPDGKWRMVLDYREVNKTIPLIAAQNQHSAGILSSIYRGKYKTTLDLTNGFWAHPITPESYWLTAFTWQGKQYCWTRLPQGFLNSPALFNADVVDLLKEIPNVQAYVDDIYISHDDPQEHLEQLEKIFSILLNAGYVVSLKKSEIAQREVEFLGFNITKEGRGLTDTFKQKLLNITPPKDLKQLQSILGKLNFARNFIPNYSELVKPLYTIVAPANGKFISWTEDNSNQLQHIISVLNQADNLEERNPETRLIIKVNSSPSAGYIRYYNEGSKRPIMYVNYIFSKAEAKFTQTEKLLTTMHKGLIKAMDLAMGQEILVYSPIVSMTKIQRTPLPERKALPVRWITWMTYLEDPRIQFHYDKSLPELQQIPNVTEDVIAKTKHPSEFAMVFYTDGSAIKHPDVNKSHSAGMGIAQVQFIPEYKIVHQWSIPLGDHTAQLAEIAAVEFACKKALKISGPVLIVTDSFYVAESANKELPYWKSNGFLNNKKKPLRHVSKWKSIAECLQLKPDIIIMHEKGHQQPMTTLHTEGNNLADKLATQGSYVVHAGKRTADGSEFEKRTADGSEFESPKKKAKVE

SEQ ID NO: 7665 - protein, 2211 aa, synthetic construct
MPAAKRVKLDGGDKKYSIGLDIGTNSVGWAVITDEYKVPSKKFKVLGNTDRHSIKKNLIGALLFDSGETAEATRLKRTARRRYTRRKNRICYLQEIFSNEMAKVDDSFFHRLEESFLVEEDKKHERHPIFGNIVDEVAYHEKYPTIYHLRKKLVDSTDKADLRLIYLALAHMIKFRGHFLIEGDLNPDNSDVDKLFIQLVQTYNQLFEENPINASGVDAKAILSARLSKSRRLENLIAQLPGEKKNGLFGNLIALSLGLTPNFKSNFDLAEDAKLQLSKDTYDDDLDNLLAQIGDQYADLFLAAKNLSDAILLSDILRVNTEITKAPLSASMIKRYDEHHQDLTLLKALVRQQLPEKYKEIFFDQSKNGYAGYIDGGASQEEFYKFIKPILEKMDGTEELLVKLNREDLLRKQRTFDNGSIPHQIHLGELHAILRRQEDFYPFLKDNREKIEKILTFRIPYYVGPLARGNSRFAWMTRKSEETITPWNFEEVVDKGASAQSFIERMTNFDKNLPNEKVLPKHSLLYEYFTVYNELTKVKYVTEGMRKPAFLSGEQKKAIVDLLFKTNRKVTVKQLKEDYFKKIECFDSVEISGVEDRFNASLGTYHDLLKIIKDKDFLDNEENEDILEDIVLTLTLFEDREMIEERLKTYAHLFDDKVMKQLKRRRYTGWGRLSRKLINGIRDKQSGKTILDFLKSDGFANRNFMQLIHDDSLTFKEDIQKAQVSGQGDSLHEHIANLAGSPAIKKGILQTVKVVDELVKVMGRHKPENIVIEMARENQTTQKGQKNSRERMKRIEEGIKELGSQILKEHPVENTQLQNEKLYLYYLQNGRDMYVDQELDINRLSDYDVDHIVPQSFLKDDSIDNKVLTRSDKARGKSDNVPSEEVVKKMKNYWRQLLNAKLITQRKFDNLTKAERGGLSELDKAGFIKRQLVETRQITKHVAQILDSRMNTKYDENDKLIREVKVITLKSKLVSDFRKDFQFYKVREINNYHHAHDAYLNAVVGTALIKKYPKLESEFVYGDYKVYDVRKMIAKSEQEIGKATAKYFFYSNIMNFFKTEITLANGEIRKRPLIETNGETGEIVWDKGRDFATVRKVLSMPQVNIVKKTEVQTGGFSKESILPKRNSDKLIARKKDWDPKKYGGFDSPTVAYSVLVVAKVEKGKSKKLKSVKELLGITIMERSSFEKNPIDFLEAKGYKEVKKDLIIKLPKYSLFELENGRKRMLASAGELQKGNELALPSKYVNFLYLASHYEKLKGSPEDNEQKQLFVEQHKHYLDEIIEQISEFSKRVILADANLDKVLSAYNKHRDKPIREQAENIIHLFTLTNLGAPAAFKYFDTTIDRKRYTSTKEVLDATLIHQSITGLYETRIDLSQLGGDGGAEAAAKEAAAKEAAAKEAAAKALEAEAAAKEAAAKEAAAKEAAAKAGGMDPLQLLQPLEAEIKGTKLKAHWNSGATITCVPEAFLEDERPIQTMLIKTIHGEKQQDVYYLTFKVQGRKVEAEVLASPYDYILLNPSDVPWLMKKPLQLTVLVPLHEYQERLLQQTALPKEQKELLQKLFLKYDALWQHWENQVGHRRIKPHNIATGTLAPRPQKQYPINPKAKPSIQIVIDDLLKQGVLIQQNSTMNTPVYPVPKPDGKWRMVLDYREVNKTIPLIAAQNQHSAGILSSIYRGKYKTTLDLTNGFWAHPITPESYWLTAFTWQGKQYCWTRLPQGFLNSPALFNADVVDLLKEIPNVQAYVDDIYISHDDPQEHLEQLEKIFSILLNAGYVVSLKKSEIAQREVEFLGFNITKEGRGLTDTFKQKLLNITPPKDLKQLQSILGLLNFARNFIPNYSELVKPLYTIVAPANGKFISWTEDNSNQLQHIISVLNQADNLEERNPETRLIIKVNSSPSAGYIRYYNEGSKRPIMYVNYIFSKAEAKFTQTEKLLTTMHKGLIKAMDLAMGQEILVYSPIVSMTKIQRTPLPERKALPVRWITWMTYLEDPRIQFHYDKSLPELQQIPNVTEDVIAKTKHPSEFAMVFYTDGSAIKHPDVNKSHSAGMGIAQVQFIPEYKIVHQWSIPLGDHTAQLAEIAAVEFACKKALKISGPVLIVTDSFYVAESANKELPYWKSNGFLNNKKKPLRHVSKWKSIAECLQLKPDIIIMHEKGHQQPMTTLHTEGNNLADKLATQGSYVVHAGKRTADGSEFEKRTADGSEFESPKKKAKVE

SEQ ID NO: 7666 - protein, 2122 aa, synthetic construct
MPAAKRVKLDGGDKKYSIGLDIGTNSVGWAVITDEYKVPSKKFKVLGNTDRHSIKKNLIGALLFDSGETAEATRLKRTARRRYTRRKNRICYLQEIFSNEMAKVDDSFFHRLEESFLVEEDKKHERHPIFGNIVDEVAYHEKYPTIYHLRKKLVDSTDKADLRLIYLALAHMIKFRGHFLIEGDLNPDNSDVDKLFIQLVQTYNQLFEENPINASGVDAKAILSARLSKSRRLENLIAQLPGEKKNGLFGNLIALSLGLTPNFKSNFDLAEDAKLQLSKDTYDDDLDNLLAQIGDQYADLFLAAKNLSDAILLSDILRVNTEITKAPLSASMIKRYDEHHQDLTLLKALVRQQLPEKYKEIFFDQSKNGYAGYIDGGASQEEFYKFIKPILEKMDGTEELLVKLNREDLLRKQRTFDNGSIPHQIHLGELHAILRRQEDFYPFLKDNREKIEKILTFRIPYYVGPLARGNSRFAWMTRKSEETITPWNFEEVVDKGASAQSFIERMTNFDKNLPNEKVLPKHSLLYEYFTVYNELTKVKYVTEGMRKPAFLSGEQKKAIVDLLFKTNRKVTVKQLKEDYFKKIECFDSVEISGVEDRFNASLGTYHDLLKIIKDKDFLDNEENEDILEDIVLTLTLFEDREMIEERLKTYAHLFDDKVMKQLKRRRYTGWGRLSRKLINGIRDKQSGKTILDFLKSDGFANRNFMQLIHDDSLTFKEDIQKAQVSGQGDSLHEHIANLAGSPAIKKGILQTVKVVDELVKVMGRHKPENIVIEMARENQTTQKGQKNSRERMKRIEEGIKELGSQILKEHPVENTQLQNEKLYLYYLQNGRDMYVDQELDINRLSDYDVDHIVPQSFLKDDSIDNKVLTRSDKARGKSDNVPSEEVVKKMKNYWRQLLNAKLITQRKFDNLTKAERGGLSELDKAGFIKRQLVETRQITKHVAQILDSRMNTKYDENDKLIREVKVITLKSKLVSDFRKDFQFYKVREINNYHHAHDAYLNAVVGTALIKKYPKLESEFVYGDYKVYDVRKMIAKSEQEIGKATAKYFFYSNIMNFFKTEITLANGEIRKRPLIETNGETGEIVWDKGRDFATVRKVLSMPQVNIVKKTEVQTGGFSKESILPKRNSDKLIARKKDWDPKKYGGFDSPTVAYSVLVVAKVEKGKSKKLKSVKELLGITIMERSSFEKNPIDFLEAKGYKEVKKDLIIKLPKYSLFELENGRKRMLASAGELQKGNELALPSKYVNFLYLASHYEKLKGSPEDNEQKQLFVEQHKHYLDEIIEQISEFSKRVILADANLDKVLSAYNKHRDKPIREQAENIIHLFTLTNLGAPAAFKYFDTTIDRKRYTSTKEVLDATLIHQSITGLYETRIDLSQLGGDGGAEAAAKEAAAKEAAAKEAAAKALEAEAAAKEAAAKEAAAKEAAAKAGGIPWLMKKPLQLTTLVPLQEYEERLLKQTMLTGSYKEKLQSLFLKYDALWQHWENQVGHRRIKPHHIATGTVNPRPQKQYPINPKAKASIQTVINDLLKQGVLIQQNSIMNTPVYPVPKPDGKWRMVLDYREVNKTIPLIAAQNQHSAGILSSIFRGKYKTTLDLSNGFWAHSITPESYWLTAFTWLGQQYCWTRLPQGFLNSPALFNADVVDLLKEVPNVQVYVDDIYISHDDPREHLEQLEKVFSLLLNAGYVVSLKKSEIAQHEVEFLGFNITKEGRGLTETFKQKLLNITPPRDLKQLQSILGLLNFARNFIPNFSELVKPLYNIIATAPGKYITWTTDNSQQLQNIISMLNSAENLEERNPEVRLIMKVNTSPSAGYIRFYNEFAKRPIMYLNYVYTKAEVKFTNTEKLLTTIHKGLIKALDLGMGQEILVYSPIVSMTKIQKTPLPERKALPIRWITWMSYLEDPRIQFHYDKTLPELQQVPTVTDDIIAKIKHPSEFSMVFYTDGSAIKHPNVNKSHNAGMGIAQVQFKPEFTVINTWSIPLGDHTAQLAEVAAVEFACKKALKIDGPVLIVTDSFYVAESVNKELPYWQSNGFFNNKKKPLKHVSKWKSIADCIQLKPDIIIIHEKGHQPTASTFHTEGNNLADKLATQGSYVVNAGKRTADGSEFEKRTADGSEFESPKKKAKVE

SEQ ID NO: 7667 - protein, 2122 aa, synthetic construct; identical to SEQ ID NO: 4541

SEQ ID NO: 7668 - protein, 2102 aa, synthetic construct
MPAAKRVKLDGGDKKYSIGLDIGTNSVGWAVITDEYKVPSKKFKVLGNTDRHSIKKNLIGALLFDSGETAEATRLKRTARRRYTRRKNRICYLQEIFSNEMAKVDDSFFHRLEESFLVEEDKKHERHPIFGNIVDEVAYHEKYPTIYHLRKKLVDSTDKADLRLIYLALAHMIKFRGHFLIEGDLNPDNSDVDKLFIQLVQTYNQLFEENPINASGVDAKAILSARLSKSRRLENLIAQLPGEKKNGLFGNLIALSLGLTPNFKSNFDLAEDAKLQLSKDTYDDDLDNLLAQIGDQYADLFLAAKNLSDAILLSDILRVNTEITKAPLSASMIKRYDEHHQDLTLLKALVRQQLPEKYKEIFFDQSKNGYAGYIDGGASQEEFYKFIKPILEKMDGTEELLVKLNREDLLRKQRTFDNGSIPHQIHLGELHAILRRQEDFYPFLKDNREKIEKILTFRIPYYVGPLARGNSRFAWMTRKSEETITPWNFEEVVDKGASAQSFIERMTNFDKNLPNEKVLPKHSLLYEYFTVYNELTKVKYVTEGMRKPAFLSGEQKKAIVDLLFKTNRKVTVKQLKEDYFKKIECFDSVEISGVEDRFNASLGTYHDLLKIIKDKDFLDNEENEDILEDIVLTLTLFEDREMIEERLKTYAHLFDDKVMKQLKRRRYTGWGRLSRKLINGIRDKQSGKTILDFLKSDGFANRNFMQLIHDDSLTFKEDIQKAQVSGQGDSLHEHIANLAGSPAIKKGILQTVKVVDELVKVMGRHKPENIVIEMARENQTTQKGQKNSRERMKRIEEGIKELGSQILKEHPVENTQLQNEKLYLYYLQNGRDMYVDQELDINRLSDYDVDHIVPQSFLKDDSIDNKVLTRSDKARGKSDNVPSEEVVKKMKNYWRQLLNAKLITQRKFDNLTKAERGGLSELDKAGFIKRQLVETRQITKHVAQILDSRMNTKYDENDKLIREVKVITLKSKLVSDFRKDFQFYKVREINNYHHAHDAYLNAVVGTALIKKYPKLESEFVYGDYKVYDVRKMIAKSEQEIGKATAKYFFYSNIMNFFKTEITLANGEIRKRPLIETNGETGEIVWDKGRDFATVRKVLSMPQVNIVKKTEVQTGGFSKESILPKRNSDKLIARKKDWDPKKYGGFDSPTVAYSVLVVAKVEKGKSKKLKSVKELLGITIMERSSFEKNPIDFLEAKGYKEVKKDLIIKLPKYSLFELENGRKRMLASAGELQKGNELALPSKYVNFLYLASHYEKLKGSPEDNEQKQLFVEQHKHYLDEIIEQISEFSKRVILADANLDKVLSAYNKHRDKPIREQAENIIHLFTLTNLGAPAAFKYFDTTIDRKRYTSTKEVLDATLIHQSITGLYETRIDLSQLGGDGGGGGGSEAAAKGGGGSGGTAPLEEEYRLFLEAPIQNVTLLEQWKREIPKVWAEINPPGLASTQAPIHVQLLSTALPVRVRQYPITLEAKRSLRETIRKFRAAGILRPVHSPWNTPLLPVRKSGTSEYRMVQDLREVNKRVETIHPTVPNPYTLLSLLPPDRIWYSVLDLKDAFFCIPLAPESQLIFAFEWADAEEGESGQLTWTRLPQGFKNSPTLFDEALNRDLQGFRLDHPSVSLLQYVDDLLIAADTQAACLSATRDLLMTLAELGYRVSGKKAQLCQEEVTYLGFKIHKGSRSLSNSRTQAILQIPVPKTKRQVREFLGTIGYCRLWIPGFAELAQPLYAATRGGNDPLVWGEKEEEAFQSLKLALTQPPALALPSLDKPFQLFVEETSGAAKGVLTQALGPWKRPVAYLSKRLDPVAAGWPRCLRAIAAAALLTREASKLTFGQDIEITSSHNLESLLRSPPDKWLTNARITQYQVLLLDPPRVRFKQTAALNPATLLPETDDTLPIHHCLDTLDSLTSTRPDLTDQPLAQAEATLFTDGSSYIRDGKRYAGAAVVTLDSVIWAEPLPIGTSAQKAELIALTKALEWSKDKSVNIYTDSRYAFATLHVHGMIYRERGLLTAGGKAIKNAPEILALLTAVWLPKRVAVMHCKGHQKDDAPTSTGNRRADEVAREVAIRPLSTQATISAGKRTADGSEFEKRTADGSEFESPKKKAKVE

SEQ ID NO: 7669 - protein, 2177 aa, synthetic construct
MPAAKRVKLDGGDKKYSIGLDIGTNSVGWAVITDEYKVPSKKFKVLGNTDRHSIKKNLIGALLFDSGETAEATRLKRTARRRYTRRKNRICYLQEIFSNEMAKVDDSFFHRLEESFLVEEDKKHERHPIFGNIVDEVAYHEKYPTIYHLRKKLVDSTDKADLRLIYLALAHMIKFRGHFLIEGDLNPDNSDVDKLFIQLVQTYNQLFEENPINASGVDAKAILSARLSKSRRLENLIAQLPGEKKNGLFGNLIALSLGLTPNFKSNFDLAEDAKLQLSKDTYDDDLDNLLAQIGDQYADLFLAAKNLSDAILLSDILRVNTEITKAPLSASMIKRYDEHHQDLTLLKALVRQQLPEKYKEIFFDQSKNGYAGYIDGGASQEEFYKFIKPILEKMDGTEELLVKLNREDLLRKQRTFDNGSIPHQIHLGELHAILRRQEDFYPFLKDNREKIEKILTFRIPYYVGPLARGNSRFAWMTRKSEETITPWNFEEVVDKGASAQSFIERMTNFDKNLPNEKVLPKHSLLYEYFTVYNELTKVKYVTEGMRKPAFLSGEQKKAIVDLLFKTNRKVTVKQLKEDYFKKIECFDSVEISGVEDRFNASLGTYHDLLKIIKDKDFLDNEENEDILEDIVLTLTLFEDREMIEERLKTYAHLFDDKVMKQLKRRRYTGWGRLSRKLINGIRDKQSGKTILDFLKSDGFANRNFMQLIHDDSLTFKEDIQKAQVSGQGDSLHEHIANLAGSPAIKKGILQTVKVVDELVKVMGRHKPENIVIEMARENQTTQKGQKNSRERMKRIEEGIKELGSQILKEHPVENTQLQNEKLYLYYLQNGRDMYVDQELDINRLSDYDVDHIVPQSFLKDDSIDNKVLTRSDKARGKSDNVPSEEVVKKMKNYWRQLLNAKLITQRKFDNLTKAERGGLSELDKAGFIKRQLVETRQITKHVAQILDSRMNTKYDENDKLIREVKVITLKSKLVSDFRKDFQFYKVREINNYHHAHDAYLNAVVGTALIKKYPKLESEFVYGDYKVYDVRKMIAKSEQEIGKATAKYFFYSNIMNFFKTEITLANGEIRKRPLIETNGETGEIVWDKGRDFATVRKVLSMPQVNIVKKTEVQTGGFSKESILPKRNSDKLIARKKDWDPKKYGGFDSPTVAYSVLVVAKVEKGKSKKLKSVKELLGITIMERSSFEKNPIDFLEAKGYKEVKKDLIIKLPKYSLFELENGRKRMLASAGELQKGNELALPSKYVNFLYLASHYEKLKGSPEDNEQKQLFVEQHKHYLDEIIEQISEFSKRVILADANLDKVLSAYNKHRDKPIREQAENIIHLFTLTNLGAPAAFKYFDTTIDRKRYTSTKEVLDATLIHQSITGLYETRIDLSQLGGDGGGGGGSEAAAKGGGGSGGMDLLKPLTVERKGVKIKGYWNSQADITCVPKDLLQGEEPVRQQNVTTIHGTQEGDVYYVNLKIDGRRINTEVIGTTLDYAIITPGDVPWILKKPLELTIKLDLEEQQGTLLNNSILSKKGKEELKQLFEKYSALWQSWENQVGHRRIRPHKIATGTVKPTPQKQYHINPKAKPDIQIVINDLLKQGVLIQKESTMNTPVYPVPKPNGRWRMVLDYRAVNKVTPLIAVQNQHSYGILGSLFKGRYKTTIDLSNGFWAHPIVPEDYWITAFTWQGKQYCWTVLPQGFLNSPGLFNGDVVDLLQGIPNVEVYVDDVYISHDSEKEHLEYLDILFNRLKEAGYIISLKKSNIANSIVDFLGFQITNEGRGLTDTFKEKLENITAPTTLKQLQSILGLLNFARNFIPDFTELIAPLYALIPKSPKNYVPWQIEHSTTLETLITKLNGAEYLQGRKGDKTLIMKVNASYTTGYIRYYNEGEKKPISYVSIVFSKTELKFTELEKLLTTVHKGLLKALDLSMGQNIHVYSPIVSMQNIQKTPQTAKKALASRWLSWLSYLEDPRIRFFYDPQMPALKDLPAVDTGKDNKKHPSNFQHIFYTDGSAITSPTKEGHLNAGMGIVYFINKDGNLQKQQEWSISLGNHTAQFAEIAAFEFALKKCLPLGGNILVVTDSNYVAKAYNEELDVWASNGFVNNRKKPLKHISKWKSVADLKRLRPDVVVTHEPGHQKLDSSPHAYGNNLADQLATQASFKVHAGKRTADGSEFEKRTADGSEFESPKKKAKVE

SEQ ID NO: 7670 - protein, 2099 aa, synthetic construct
MPAAKRVKLDGGDKKYSIGLDIGTNSVGWAVITDEYKVPSKKFKVLGNTDRHSIKKNLIGALLFDSGETAEATRLKRTARRRYTRRKNRICYLQEIFSNEMAKVDDSFFHRLEESFLVEEDKKHERHPIFGNIVDEVAYHEKYPTIYHLRKKLVDSTDKADLRLIYLALAHMIKFRGHFLIEGDLNPDNSDVDKLFIQLVQTYNQLFEENPINASGVDAKAILSARLSKSRRLENLIAQLPGEKKNGLFGNLIALSLGLTPNFKSNFDLAEDAKLQLSKDTYDDDLDNLLAQIGDQYADLFLAAKNLSDAILLSDILRVNTEITKAPLSASMIKRYDEHHQDLTLLKALVRQQLPEKYKEIFFDQSKNGYAGYIDGGASQEEFYKFIKPILEKMDGTEELLVKLNREDLLRKQRTFDNGSIPHQIHLGELHAILRRQEDFYPFLKDNREKIEKILTFRIPYYVGPLARGNSRFAWMTRKSEETITPWNFEEVVDKGASAQSFIERMTNFDKNLPNEKVLPKHSLLYEYFTVYNELTKVKYVTEGMRKPAFLSGEQKKAIVDLLFKTNRKVTVKQLKEDYFKKIECFDSVEISGVEDRFNASLGTYHDLLKIIKDKDFLDNEENEDILEDIVLTLTLFEDREMIEERLKTYAHLFDDKVMKQLKRRRYTGWGRLSRKLINGIRDKQSGKTILDFLKSDGFANRNFMQLIHDDSLTFKEDIQKAQVSGQGDSLHEHIANLAGSPAIKKGILQTVKVVDELVKVMGRHKPENIVIEMARENQTTQKGQKNSRERMKRIEEGIKELGSQILKEHPVENTQLQNEKLYLYYLQNGRDMYVDQELDINRLSDYDVDHIVPQSFLKDDSIDNKVLTRSDKARGKSDNVPSEEVVKKMKNYWRQLLNAKLITQRKFDNLTKAERGGLSELDKAGFIKRQLVETRQITKHVAQILDSRMNTKYDENDKLIREVKVITLKSKLVSDFRKDFQFYKVREINNYHHAHDAYLNAVVGTALIKKYPKLESEFVYGDYKVYDVRKMIAKSEQEIGKATAKYFFYSNIMNFFKTEITLANGEIRKRPLIETNGETGEIVWDKGRDFATVRKVLSMPQVNIVKKTEVQTGGFSKESILPKRNSDKLIARKKDWDPKKYGGFDSPTVAYSVLVVAKVEKGKSKKLKSVKELLGITIMERSSFEKNPIDFLEAKGYKEVKKDLIIKLPKYSLFELENGRKRMLASAGELQKGNELALPSKYVNFLYLASHYEKLKGSPEDNEQKQLFVEQHKHYLDEIIEQISEFSKRVILADANLDKVLSAYNKHRDKPIREQAENIIHLFTLTNLGAPAAFKYFDTTIDRKRYTSTKEVLDATLIHQSITGLYETRIDLSQLGGDGGGGGGSEAAAKGGGGSGGTLQLEEEYRLFEPESTQKQEMDIWLKNFPQAWAETGGMGTAHCQAPVLIQLKATATPISIRQYPMPHEAYQGIKPHIRRMLDQGILKPCQSPWNTPLLPVKKPGTEDYRPVQDLREVNKRVEDIHPTVPNPYNLLSTLPPSHPWYTVLDLKDAFFCLRLHSESQLLFAFEWRDPEIGLSGQLTWTRLPQGFKNSPTLFNEALHSDLADFRVRYPALVLLQYVDDLLLAAATRTECLEGTKALLETLGNKGYRASAKKAQICLQEVTYLGYSLKDGQRWLTKARKEAILSIPVPKNSRQVREFLGTAGYCRLWIPGFAELAAPLYPLTRPGTLFQWGTEQQLAFEDIKKALLSSPALGLPDITKPFELFIDENSGFAKGVLVQKLGPWKRPVAYLSKKLDTVASGWPPCLRMVAAIAILVKDAGKLTLGQPLTILTSHPVEALVRQPPNKWLSNARMTHYQAMLLDAERVHFGPTVSLNPATLLPLPSGGNHHDCLQILAETHGTRPDLTDQPLPDADLTWYTDGSSFIRNGEREAGAAVTTESEVIWAAPLPPGTSAQRAELIALTQALKMAEGKKLTVYTDSRYAFATTHVHGEIYRRRGWLTSEGKEIKNKNEILALLEALFLPKRLSIIHCPGHQKGDSPQAKGNRLADDTAKKAATETHSSLTVLPAGKRTADGSEFEKRTADGSEFESPKKKAKVE

SEQ ID NO: 7671 - protein, 2180 aa, synthetic construct
MPAAKRVKLDGGDKKYSIGLDIGTNSVGWAVITDEYKVPSKKFKVLGNTDRHSIKKNLIGALLFDSGETAEATRLKRTARRRYTRRKNRICYLQEIFSNEMAKVDDSFFHRLEESFLVEEDKKHERHPIFGNIVDEVAYHEKYPTIYHLRKKLVDSTDKADLRLIYLALAHMIKFRGHFLIEGDLNPDNSDVDKLFIQLVQTYNQLFEENPINASGVDAKAILSARLSKSRRLENLIAQLPGEKKNGLFGNLIALSLGLTPNFKSNFDLAEDAKLQLSKDTYDDDLDNLLAQIGDQYADLFLAAKNLSDAILLSDILRVNTEITKAPLSASMIKRYDEHHQDLTLLKALVRQQLPEKYKEIFFDQSKNGYAGYIDGGASQEEFYKFIKPILEKMDGTEELLVKLNREDLLRKQRTFDNGSIPHQIHLGELHAILRRQEDFYPFLKDNREKIEKILTFRIPYYVGPLARGNSRFAWMTRKSEETITPWNFEEVVDKGASAQSFIERMTNFDKNLPNEKVLPKHSLLYEYFTVYNELTKVKYVTEGMRKPAFLSGEQKKAIVDLLFKTNRKVTVKQLKEDYFKKIECFDSVEISGVEDRFNASLGTYHDLLKIIKDKDFLDNEENEDILEDIVLTLTLFEDREMIEERLKTYAHLFDDKVMKQLKRRRYTGWGRLSRKLINGIRDKQSGKTILDFLKSDGFANRNFMQLIHDDSLTFKEDIQKAQVSGQGDSLHEHIANLAGSPAIKKGILQTVKVVDELVKVMGRHKPENIVIEMARENQTTQKGQKNSRERMKRIEEGIKELGSQILKEHPVENTQLQNEKLYLYYLQNGRDMYVDQELDINRLSDYDVDHIVPQSFLKDDSIDNKVLTRSDKARGKSDNVPSEEVVKKMKNYWRQLLNAKLITQRKFDNLTKAERGGLSELDKAGFIKRQLVETRQITKHVAQILDSRMNTKYDENDKLIREVKVITLKSKLVSDFRKDFQFYKVREINNYHHAHDAYLNAVVGTALIKKYPKLESEFVYGDYKVYDVRKMIAKSEQEIGKATAKYFFYSNIMNFFKTEITLANGEIRKRPLIETNGETGEIVWDKGRDFATVRKVLSMPQVNIVKKTEVQTGGFSKESILPKRNSDKLIARKKDWDPKKYGGFDSPTVAYSVLVVAKVEKGKSKKLKSVKELLGITIMERSSFEKNPIDFLEAKGYKEVKKDLIIKLPKYSLFELENGRKRMLASAGELQKGNELALPSKYVNFLYLASHYEKLKGSPEDNEQKQLFVEQHKHYLDEIIEQISEFSKRVILADANLDKVLSAYNKHRDKPIREQAENIIHLFTLTNLGAPAAFKYFDTTIDRKRYTSTKEVLDATLIHQSITGLYETRIDLSQLGGDGGGGGGSEAAAKGGGGSGGMNPLQLLQPLPAEIKGTKLLAHWNSGATITCIPESFLEDEQPIKKTLIKTIHGEKQQNVYYVTFKVKGRKVEAEVIASPYEYILLSPTDVPWLTQQPLQLTILVPLQEYQEKILSKTALPEDQKQQLKTLFVKYDNLWQHWENQVGHRKIRPHNIATGDYPPRPQKQYPINPKAKPSIQIVIDDLLKQGVLTPQNSTMNTPVYPVPKPDGRWRMVLDYREVNKTIPLTAAQNQHSAGILATIVRQKYKTTLDLANGFWAHPITPESYWLTAFTWQGKQYCWTRLPQGFLNSPALFNADVVDLLKEIPNVQVYVDDIYLSHDDPKEHVQQLEKVFQILLQAGYVVSLKKSEIGQKTVEFLGFNITKEGRGLTDTFKTKLLNITPPKDLKQLQSILGKLNFARNFIPNFAELVQPLYNLIAPAKGKYIEWSEENTKQLNMVIEALNTASNLEERLPEQRLVIKVNTSPSAGYVRYYNETGKKPIMYLNYVFSKAELKFSMLEKLLTTMHKALIKAMDLAMGQEILVYSPIVSMTKIQKTPLPERKALPIRWITWMTYLEDPRIQFHYDKTLPELKHIPDVYTSSQSPVKHPSQYEGVFYTDGSAIKSPDPTKSNNAGMGIVHATYKPEYQVLNQWSIPLGNHTAQMAEIAAVEFACKKALKIPGPVLVITDSFYVAESANKELPYWKSNGFVNNKKKPLKHISKWKSIAECLSMKPDITIQHEKGISLQIPVFILKGNALADKLATQGSYVVNAGKRTADGSEFEKRTADGSEFESPKKKAKVE

SEQ ID NO: 7672 - protein, 2098 aa, synthetic construct
MPAAKRVKLDGGDKKYSIGLDIGTNSVGWAVITDEYKVPSKKFKVLGNTDRHSIKKNLIGALLFDSGETAEATRLKRTARRRYTRRKNRICYLQEIFSNEMAKVDDSFFHRLEESFLVEEDKKHERHPIFGNIVDEVAYHEKYPTIYHLRKKLVDSTDKADLRLIYLALAHMIKFRGHFLIEGDLNPDNSDVDKLFIQLVQTYNQLFEENPINASGVDAKAILSARLSKSRRLENLIAQLPGEKKNGLFGNLIALSLGLTPNFKSNFDLAEDAKLQLSKDTYDDDLDNLLAQIGDQYADLFLAAKNLSDAILLSDILRVNTEITKAPLSASMIKRYDEHHQDLTLLKALVRQQLPEKYKEIFFDQSKNGYAGYIDGGASQEEFYKFIKPILEKMDGTEELLVKLNREDLLRKQRTFDNGSIPHQIHLGELHAILRRQEDFYPFLKDNREKIEKILTFRIPYYVGPLARGNSRFAWMTRKSEETITPWNFEEVVDKGASAQSFIERMTNFDKNLPNEKVLPKHSLLYEYFTVYNELTKVKYVTEGMRKPAFLSGEQKKAIVDLLFKTNRKVTVKQLKEDYFKKIECFDSVEISGVEDRFNASLGTYHDLLKIIKDKDFLDNEENEDILEDIVLTLTLFEDREMIEERLKTYAHLFDDKVMKQLKRRRYTGWGRLSRKLINGIRDKQSGKTILDFLKSDGFANRNFMQLIHDDSLTFKEDIQKAQVSGQGDSLHEHIANLAGSPAIKKGILQTVKVVDELVKVMGRHKPENIVIEMARENQTTQKGQKNSRERMKRIEEGIKELGSQILKEHPVENTQLQNEKLYLYYLQNGRDMYVDQELDINRLSDYDVDHIVPQSFLKDDSIDNKVLTRSDKARGKSDNVPSEEVVKKMKNYWRQLLNAKLITQRKFDNLTKAERGGLSELDKAGFIKRQLVETRQITKHVAQILDSRMNTKYDENDKLIREVKVITLKSKLVSDFRKDFQFYKVREINNYHHAHDAYLNAVVGTALIKKYPKLESEFVYGDYKVYDVRKMIAKSEQEIGKATAKYFFYSNIMNFFKTEITLANGEIRKRPLIETNGETGEIVWDKGRDFATVRKVLSMPQVNIVKKTEVQTGGFSKESILPKRNSDKLIARKKDWDPKKYGGFDSPTVAYSVLVVAKVEKGKSKKLKSVKELLGITIMERSSFEKNPIDFLEAKGYKEVKKDLIIKLPKYSLFELENGRKRMLASAGELQKGNELALPSKYVNFLYLASHYEKLKGSPEDNEQKQLFVEQHKHYLDEIIEQISEFSKRVILADANLDKVLSAYNKHRDKPIREQAENIIHLFTLTNLGAPAAFKYFDTTIDRKRYTSTKEVLDATLIHQSITGLYETRIDLSQLGGDGGGGGGSEAAAKGGGGSGGVLNLEEEYRLHEKPVPSSIDPSWLQLFPTVWAERAGMGLANQVPPVVVELRSGASPVAVRQYPMSKEAREGIRPHIQKFLDLGVLVPCRSPWNTPLLPVKKPGTNDYRPVQDLREINKRVQDIHPTVPNPYNLLSSLPPSYTWYSVLDLKDAFFCLRLHPNSQPLFAFEWKDPEKGNTGQLTWTRLPQGFKNSPTLFNEALHRDLAPFRALNPQVVLLQYVDDLLVAAPTYEDCKKGTQKLLQELSKLGYRVSAKKAQLCQREVTYLGYLLKEGKRWLTPARKATVMKIPVPTTPRQVREFLGKAGFCRLFIPGFASLAAPLYPLTKPSIPFIWTEEHQQAFDHIKKALLSAPALALPDLTKPFTLYIDERAGVARGVLTQTLGPWRRPVAYLSKKLDPVASGWPTCLKAVAAVALLLKDADKLTLGQNVTVIASHSLESIVRQPPDRWMTNARMTHYQSLLLNERVSFAPPAVLNPATLLPVESEATPVHRCSEILAEETGTRRDLEDQPLPGVPTWYTDGSSFITEGKRRAGAPIVDGKRTVWASSLPEGTSAQKAELVALTQALRLAEGKNINIYTDSRYAFATAHIHGAIYKQRGWLTSAGKDIKNKEEILALLEAIHLPRRVAIIHCPGHQRGSNPVATGNRRADEAAKQAALSTRVLAGTTKPAGKRTADGSEFEKRTADGSEFESPKKKAKVE

SEQ ID NO: 7673 - protein, 2017 aa, synthetic construct
MPAAKRVKLDGGDKKYSIGLDIGTNSVGWAVITDEYKVPSKKFKVLGNTDRHSIKKNLIGALLFDSGETAEATRLKRTARRRYTRRKNRICYLQEIFSNEMAKVDDSFFHRLEESFLVEEDKKHERHPIFGNIVDEVAYHEKYPTIYHLRKKLVDSTDKADLRLIYLALAHMIKFRGHFLIEGDLNPDNSDVDKLFIQLVQTYNQLFEENPINASGVDAKAILSARLSKSRRLENLIAQLPGEKKNGLFGNLIALSLGLTPNFKSNFDLAEDAKLQLSKDTYDDDLDNLLAQIGDQYADLFLAAKNLSDAILLSDILRVNTEITKAPLSASMIKRYDEHHQDLTLLKALVRQQLPEKYKEIFFDQSKNGYAGYIDGGASQEEFYKFIKPILEKMDGTEELLVKLNREDLLRKQRTFDNGSIPHQIHLGELHAILRRQEDFYPFLKDNREKIEKILTFRIPYYVGPLARGNSRFAWMTRKSEETITPWNFEEVVDKGASAQSFIERMTNFDKNLPNEKVLPKHSLLYEYFTVYNELTKVKYVTEGMRKPAFLSGEQKKAIVDLLFKTNRKVTVKQLKEDYFKKIECFDSVEISGVEDRFNASLGTYHDLLKIIKDKDFLDNEENEDILEDIVLTLTLFEDREMIEERLKTYAHLFDDKVMKQLKRRRYTGWGRLSRKLINGIRDKQSGKTILDFLKSDGFANRNFMQLIHDDSLTFKEDIQKAQVSGQGDSLHEHIANLAGSPAIKKGILQTVKVVDELVKVMGRHKPENIVIEMARENQTTQKGQKNSRERMKRIEEGIKELGSQILKEHPVENTQLQNEKLYLYYLQNGRDMYVDQELDINRLSDYDVDHIVPQSFLKDDSIDNKVLTRSDKARGKSDNVPSEEVVKKMKNYWRQLLNAKLITQRKFDNLTKAERGGLSELDKAGFIKRQLVETRQITKHVAQILDSRMNTKYDENDKLIREVKVITLKSKLVSDFRKDFQFYKVREINNYHHAHDAYLNAVVGTALIKKYPKLESEFVYGDYKVYDVRKMIAKSEQEIGKATAKYFFYSNIMNFFKTEITLANGEIRKRPLIETNGETGEIVWDKGRDFATVRKVLSMPQVNIVKKTEVQTGGFSKESILPKRNSDKLIARKKDWDPKKYGGFDSPTVAYSVLVVAKVEKGKSKKLKSVKELLGITIMERSSFEKNPIDFLEAKGYKEVKKDLIIKLPKYSLFELENGRKRMLASAGELQKGNELALPSKYVNFLYLASHYEKLKGSPEDNEQKQLFVEQHKHYLDEIIEQISEFSKRVILADANLDKVLSAYNKHRDKPIREQAENIIHLFTLTNLGAPAAFKYFDTTIDRKRYTSTKEVLDATLIHQSITGLYETRIDLSQLGGDGGGGGGSEAAAKGGGGSGGAVLGLEHLPRPPEISQFPLNPERLQALQHLVRKALEAGHIEPYTGPGNNPVFPVKKANGTWRFIHDLRATNSLTIDLSSSSPGPPDLSSLPTTLAHLQTIDLKDAFFQIPLPKQFQPYFAFTVPQQCNYGPGTRYAWRVLPQGFKNSPTLFQMQLAHILQPIRQAFPQCTILQYMDDILLASPSHADLQLLSEATMASLISHGLPVSENKTQQTPGTIKFLGQIISPNHLTYDAVPKVPIRSRWALPELQALLGEIQWVSKGTPTLRQPLHSLYCALQPHTDPRDQIYLNPSQVQSLVQLRQALSQNCRSRLVQTLPLLGAIMLTLTGTTTVVFQSKQQWPLVWLHAPLPHTSQCPWGQLLASAVLLLDKYTLQSYGLLCQTIHHNISTQTFNQFIQTSDHPSVPILLHHSHRFKNLGAQTGELWNTFLKTTAPLAPVKALMPVFTLSPVIINTAPCLFSDGSTSQAAYILWDKHILSQRSFPLPPPHKSAQRAELLGLLHGLSSARSWRCLNIFLDSKYLYHYLRTLALGTFQGRSSQAPFQALLPRLLSRKVVYLHHVRSHTNLPDPISRLNALTDALLITPVLQLAGKRTADGSEFEKRTADGSEFESPKKKAKVE

SEQ ID NO: 7674 - protein, 2100 aa, synthetic construct
MPAAKRVKLDGGDKKYSIGLDIGTNSVGWAVITDEYKVPSKKFKVLGNTDRHSIKKNLIGALLFDSGETAEATRLKRTARRRYTRRKNRICYLQEIFSNEMAKVDDSFFHRLEESFLVEEDKKHERHPIFGNIVDEVAYHEKYPTIYHLRKKLVDSTDKADLRLIYLALAHMIKFRGHFLIEGDLNPDNSDVDKLFIQLVQTYNQLFEENPINASGVDAKAILSARLSKSRRLENLIAQLPGEKKNGLFGNLIALSLGLTPNFKSNFDLAEDAKLQLSKDTYDDDLDNLLAQIGDQYADLFLAAKNLSDAILLSDILRVNTEITKAPLSASMIKRYDEHHQDLTLLKALVRQQLPEKYKEIFFDQSKNGYAGYIDGGASQEEFYKFIKPILEKMDGTEELLVKLNREDLLRKQRTFDNGSIPHQIHLGELHAILRRQEDFYPFLKDNREKIEKILTFRIPYYVGPLARGNSRFAWMTRKSEETITPWNFEEVVDKGASAQSFIERMTNFDKNLPNEKVLPKHSLLYEYFTVYNELTKVKYVTEGMRKPAFLSGEQKKAIVDLLFKTNRKVTVKQLKEDYFKKIECFDSVEISGVEDRFNASLGTYHDLLKIIKDKDFLDNEENEDILEDIVLTLTLFEDREMIEERLKTYAHLFDDKVMKQLKRRRYTGWGRLSRKLINGIRDKQSGKTILDFLKSDGFANRNFMQLIHDDSLTFKEDIQKAQVSGQGDSLHEHIANLAGSPAIKKGILQTVKVVDELVKVMGRHKPENIVIEMARENQTTQKGQKNSRERMKRIEEGIKELGSQILKEHPVENTQLQNEKLYLYYLQNGRDMYVDQELDINRLSDYDVDHIVPQSFLKDDSIDNKVLTRSDKARGKSDNVPSEEVVKKMKNYWRQLLNAKLITQRKFDNLTKAERGGLSELDKAGFIKRQLVETRQITKHVAQILDSRMNTKYDENDKLIREVKVITLKSKLVSDFRKDFQFYKVREINNYHHAHDAYLNAVVGTALIKKYPKLESEFVYGDYKVYDVRKMIAKSEQEIGKATAKYFFYSNIMNFFKTEITLANGEIRKRPLIETNGETGEIVWDKGRDFATVRKVLSMPQVNIVKKTEVQTGGFSKESILPKRNSDKLIARKKDWDPKKYGGFDSPTVAYSVLVVAKVEKGKSKKLKSVKELLGITIMERSSFEKNPIDFLEAKGYKEVKKDLIIKLPKYSLFELENGRKRMLASAGELQKGNELALPSKYVNFLYLASHYEKLKGSPEDNEQKQLFVEQHKHYLDEIIEQISEFSKRVILADANLDKVLSAYNKHRDKPIREQAENIIHLFTLTNLGAPAAFKYFDTTIDRKRYTSTKEVLDATLIHQSITGLYETRIDLSQLGGDGGGGGGSEAAAKGGGGSGGTLNLEDEYRLYETSAEPEVSPGSTWLSDFPQAWAETGGMGLAVRQAPLIIPLKATSTPVSIKQYPMSQEAKLGIKPHIQRLLDQGILVPCQSPWNTPLLPVKKPGTNDYRPVQDLREVNKRVEDIHPTVPNPYNLLSGLPPSHRWYTVLDLKDAFFCLRLHPTSQPLFAFEWRDPGMGISGQLTWTRLPQGFKNSPTLFNEALHRDLADFRIQHPDLILLQYVDDILLAATSELDCQQGTRALLLTLGNLGYRASAKKAQLCQKQVKYLGYLLKEGQRWLTEARKETVMGQPTPKTPRQLREFLGKAGFCRLFIPGFAEMAAPLYPLTKPGTLFNWGPDQQKAYQEIKQALLTAPALGLPDLTKPFELFVDEKQGYAKGVLTQKLGPWRRPVAYLSKKLDPVAAGWPPCLRMVAAIAVLRKDAGKLTMGQPLVILAPHAVEALVKQPPDRWLSNARMTHYQAMLLDTDRVQFGPVVALNPATLLPLPEEGAPHDCLEILAETHGTRPDLTDQPIPDADHTWYTDGSSFLQEGQRKAGAAVTTETEVIWARALPAGTSAQRAELIALTQALKMAEGKRLNVYTDSRYAFATAHIHGEIYRRRGWLTSEGREIKNKSEILALLKALFLPKRLSIIHCLGHQKGDSAEARGNRLADQAAREAAIKTPPDTSTLLAGKRTADGSEFEKRTADGSEFESPKKKAKVE

SEQ ID NO: 7675 - protein, 2100 aa, synthetic construct
MPAAKRVKLDGGDKKYSIGLDIGTNSVGWAVITDEYKVPSKKFKVLGNTDRHSIKKNLIGALLFDSGETAEATRLKRTARRRYTRRKNRICYLQEIFSNEMAKVDDSFFHRLEESFLVEEDKKHERHPIFGNIVDEVAYHEKYPTIYHLRKKLVDSTDKADLRLIYLALAHMIKFRGHFLIEGDLNPDNSDVDKLFIQLVQTYNQLFEENPINASGVDAKAILSARLSKSRRLENLIAQLPGEKKNGLFGNLIALSLGLTPNFKSNFDLAEDAKLQLSKDTYDDDLDNLLAQIGDQYADLFLAAKNLSDAILLSDILRVNTEITKAPLSASMIKRYDEHHQDLTLLKALVRQQLPEKYKEIFFDQSKNGYAGYIDGGASQEEFYKFIKPILEKMDGTEELLVKLNREDLLRKQRTFDNGSIPHQIHLGELHAILRRQEDFYPFLKDNREKIEKILTFRIPYYVGPLARGNSRFAWMTRKSEETITPWNFEEVVDKGASAQSFIERMTNFDKNLPNEKVLPKHSLLYEYFTVYNELTKVKYVTEGMRKPAFLSGEQKKAIVDLLFKTNRKVTVKQLKEDYFKKIECFDSVEISGVEDRFNASLGTYHDLLKIIKDKDFLDNEENEDILEDIVLTLTLFEDREMIEERLKTYAHLFDDKVMKQLKRRRYTGWGRLSRKLINGIRDKQSGKTILDFLKSDGFANRNFMQLIHDDSLTFKEDIQKAQVSGQGDSLHEHIANLAGSPAIKKGILQTVKVVDELVKVMGRHKPENIVIEMARENQTTQKGQKNSRERMKRIEEGIKELGSQILKEHPVENTQLQNEKLYLYYLQNGRDMYVDQELDINRLSDYDVDHIVPQSFLKDDSIDNKVLTRSDKARGKSDNVPSEEVVKKMKNYWRQLLNAKLITQRKFDNLTKAERGGLSELDKAGFIKRQLVETRQITKHVAQILDSRMNTKYDENDKLIREVKVITLKSKLVSDFRKDFQFYKVREINNYHHAHDAYLNAVVGTALIKKYPKLESEFVYGDYKVYDVRKMIAKSEQEIGKATAKYFFYSNIMNFFKTEITLANGEIRKRPLIETNGETGEIVWDKGRDFATVRKVLSMPQVNIVKKTEVQTGGFSKESILPKRNSDKLIARKKDWDPKKYGGFDSPTVAYSVLVVAKVEKGKSKKLKSVKELLGITIMERSSFEKNPIDFLEAKGYKEVKKDLIIKLPKYSLFELENGRKRMLASAGELQKGNELALPSKYVNFLYLASHYEKLKGSPEDNEQKQLFVEQHKHYLDEIIEQISEFSKRVILADANLDKVLSAYNKHRDKPIREQAENIIHLFTLTNLGAPAAFKYFDTTIDRKRYTSTKEVLDATLIHQSITGLYETRIDLSQLGGDGGGGGGSEAAAKGGGGSGGTLGIEDEYRLHETSTEPDVSLGSTWLSDFPQAWAETGGMGLAVRQAPLIIPLKATSTPVSIQQYPMSHEARLGIKPHIQRLLDQGILVPCQSPWNTPLLPVKKPGTNDYRPVQDLREVNKRVEDIHPTVPNPYNLLSGLPPSHQWYTVLDLKDAFFCLRLHPTSQPLFAFEWRDPGMGISGQLTWTRLPQGFKNSPTLFNEALHRDLADFRIQHPDLILLQYVDDILLAATSELDCQQGTRALLQTLGDLGYRASAKKAQICQKQVKYLGYLLREGQRWLTEARKETVMGQPVPKTPRQLREFLGTAGFCRLWIPGFAEMAAPLYPLTKPGTLFSWGPDQQKAYQEIKQALLTAPALGLPDLTKPFELFVDEKQGYAKGVLTQKLGPWRRPVAYLSKKLDPVAAGWPPCLRMVAAIAVLTKDAGKLTMGQPLVILAPHAVEALVKQPPDRWLSNARMTHYQAMLLDTDRVQFGPVVALNPATLLPLPEEGAPHDCLEILAETHGTRPDLTDQPIPDADHTWYTDGSSFLQEGQRKAGAAVTTETEVIWAGALPAGTSAQRAELIALTQALKMAEGKRLNVYTDSRYAFATAHIHGEIYRRRGWLTSEGREIKNKSEILALLKALFLPKRLSIIHCLGHQKGDSAEARGNRLADQAAREAAIKTPPDTSTLLAGKRTADGSEFEKRTADGSEFESPKKKAKVE

SEQ ID NO: 7676 - protein, 2100 aa, synthetic construct
MPAAKRVKLDGGDKKYSIGLDIGTNSVGWAVITDEYKVPSKKFKVLGNTDRHSIKKNLIGALLFDSGETAEATRLKRTARRRYTRRKNRICYLQEIFSNEMAKVDDSFFHRLEESFLVEEDKKHERHPIFGNIVDEVAYHEKYPTIYHLRKKLVDSTDKADLRLIYLALAHMIKFRGHFLIEGDLNPDNSDVDKLFIQLVQTYNQLFEENPINASGVDAKAILSARLSKSRRLENLIAQLPGEKKNGLFGNLIALSLGLTPNFKSNFDLAEDAKLQLSKDTYDDDLDNLLAQIGDQYADLFLAAKNLSDAILLSDILRVNTEITKAPLSASMIKRYDEHHQDLTLLKALVRQQLPEKYKEIFFDQSKNGYAGYIDGGASQEEFYKFIKPILEKMDGTEELLVKLNREDLLRKQRTFDNGSIPHQIHLGELHAILRRQEDFYPFLKDNREKIEKILTFRIPYYVGPLARGNSRFAWMTRKSEETITPWNFEEVVDKGASAQSFIERMTNFDKNLPNEKVLPKHSLLYEYFTVYNELTKVKYVTEGMRKPAFLSGEQKKAIVDLLFKTNRKVTVKQLKEDYFKKIECFDSVEISGVEDRFNASLGTYHDLLKIIKDKDFLDNEENEDILEDIVLTLTLFEDREMIEERLKTYAHLFDDKVMKQLKRRRYTGWGRLSRKLINGIRDKQSGKTILDFLKSDGFANRNFMQLIHDDSLTFKEDIQKAQVSGQGDSLHEHIANLAGSPAIKKGILQTVKVVDELVKVMGRHKPENIVIEMARENQTTQKGQKNSRERMKRIEEGIKELGSQILKEHPVENTQLQNEKLYLYYLQNGRDMYVDQELDINRLSDYDVDHIVPQSFLKDDSIDNKVLTRSDKARGKSDNVPSEEVVKKMKNYWRQLLNAKLITQRKFDNLTKAERGGLSELDKAGFIKRQLVETRQITKHVAQILDSRMNTKYDENDKLIREVKVITLKSKLVSDFRKDFQFYKVREINNYHHAHDAYLNAVVGTALIKKYPKLESEFVYGDYKVYDVRKMIAKSEQEIGKATAKYFFYSNIMNFFKTEITLANGEIRKRPLIETNGETGEIVWDKGRDFATVRKVLSMPQVNIVKKTEVQTGGFSKESILPKRNSDKLIARKKDWDPKKYGGFDSPTVAYSVLVVAKVEKGKSKKLKSVKELLGITIMERSSFEKNPIDFLEAKGYKEVKKDLIIKLPKYSLFELENGRKRMLASAGELQKGNELALPSKYVNFLYLASHYEKLKGSPEDNEQKQLFVEQHKHYLDEIIEQISEFSKRVILADANLDKVLSAYNKHRDKPIREQAENIIHLFTLTNLGAPAAFKYFDTTIDRKRYTSTKEVLDATLIHQSITGLYETRIDLSQLGGDGGGGGGSEAAAKGGGGSGGTLNIEDEYRLHETSKEPDVSLGSTWLSDFPQAWAETGGMGLAVRQAPLIIPLKATSTPVSIKQYPMSQEARLGIKPHIQRLLDQGILVPCQSPWNTPLLPVKKPGTNDYRPVQDLREVNKRVEDIHPTVPNPYNLLSGLPPSHQWYTVLDLKDAFFCLRLHPTSQPLFAFEWRDPEMGISGQLTWTRLPQGFKNSPTLFNEALHRDLAGFRIQHPDLILLQYVDDLLLAATSELDCQQGTRALLQTLGDLGYRASAKKAQICQKQVKYLGYLLKEGQRWLTEARKETVMGQPIPKTPRQLREFLGTAGFCRLWIPGFAEMAAPLYPLTKPGTLFNWGPDQQKAFQEIKQALLTAPALGLPDLTKPFELFVDEKQGYAKGVLTQKLGPWRRPVAYLSKKLDPVAAGWPPCLRMVAAIAVLTKDAGKLTMGQPLVILAPHAVEALVKQPPDRWLSNARMTHYQALLLDTDRVQFGPVVALNPATLLPLPEEGLQHDCLDILAEAHGTRSDLMDQPLPDADHTWYTDGSSFLQEGQRKAGAAVTTETEVIWARALPAGTSAQRAELIALTQALKMAEGKKLNVYTDSRYAFATAHIHGEIYRRRGWLTSEGKEIKNKDEILALLKALFLPKRLSIIHCPGHQKGNSAEARGNRMADQAAREVATRETPETSTLLAGKRTADGSEFEKRTADGSEFESPKKKAKVE

SEQ ID NO: 7677 - protein, 2100 aa, synthetic construct
MPAAKRVKLDGGDKKYSIGLDIGTNSVGWAVITDEYKVPSKKFKVLGNTDRHSIKKNLIGALLFDSGETAEATRLKRTARRRYTRRKNRICYLQEIFSNEMAKVDDSFFHRLEESFLVEEDKKHERHPIFGNIVDEVAYHEKYPTIYHLRKKLVDSTDKADLRLIYLALAHMIKFRGHFLIEGDLNPDNSDVDKLFIQLVQTYNQLFEENPINASGVDAKAILSARLSKSRRLENLIAQLPGEKKNGLFGNLIALSLGLTPNFKSNFDLAEDAKLQLSKDTYDDDLDNLLAQIGDQYADLFLAAKNLSDAILLSDILRVNTEITKAPLSASMIKRYDEHHQDLTLLKALVRQQLPEKYKEIFFDQSKNGYAGYIDGGASQEEFYKFIKPILEKMDGTEELLVKLNREDLLRKQRTFDNGSIPHQIHLGELHAILRRQEDFYPFLKDNREKIEKILTFRIPYYVGPLARGNSRFAWMTRKSEETITPWNFEEVVDKGASAQSFIERMTNFDKNLPNEKVLPKHSLLYEYFTVYNELTKVKYVTEGMRKPAFLSGEQKKAIVDLLFKTNRKVTVKQLKEDYFKKIECFDSVEISGVEDRFNASLGTYHDLLKIIKDKDFLDNEENEDILEDIVLTLTLFEDREMIEERLKTYAHLFDDKVMKQLKRRRYTGWGRLSRKLINGIRDKQSGKTILDFLKSDGFANRNFMQLIHDDSLTFKEDIQKAQVSGQGDSLHEHIANLAGSPAIKKGILQTVKVVDELVKVMGRHKPENIVIEMARENQTTQKGQKNSRERMKRIEEGIKELGSQILKEHPVENTQLQNEKLYLYYLQNGRDMYVDQELDINRLSDYDVDHIVPQSFLKDDSIDNKVLTRSDKARGKSDNVPSEEVVKKMKNYWRQLLNAKLITQRKFDNLTKAERGGLSELDKAGFIKRQLVETRQITKHVAQILDSRMNTKYDENDKLIREVKVITLKSKLVSDFRKDFQFYKVREINNYHHAHDAYLNAVVGTALIKKYPKLESEFVYGDYKVYDVRKMIAKSEQEIGKATAKYFFYSNIMNFFKTEITLANGEIRKRPLIETNGETGEIVWDKGRDFATVRKVLSMPQVNIVKKTEVQTGGFSKESILPKRNSDKLIARKKDWDPKKYGGFDSPTVAYSVLVVAKVEKGKSKKLKSVKELLGITIMERSSFEKNPIDFLEAKGYKEVKKDLIIKLPKYSLFELENGRKRMLASAGELQKGNELALPSKYVNFLYLASHYEKLKGSPEDNEQKQLFVEQHKHYLDEIIEQISEFSKRVILADANLDKVLSAYNKHRDKPIREQAENIIHLFTLTNLGAPAAFKYFDTTIDRKRYTSTKEVLDATLIHQSITGLYETRIDLSQLGGDGGGGGGSEAAAKGGGGSGGTLNIEDEYRLHETSKGPDVPLGSTWLSDFPQAWAETGGMGLAVRQAPLIIPLKATSTPVSIKQYPMSQEARLGIKPHIQRLLDQGILVPCQSPWNTPLLPVKKPGTNDYRPVQDLREVNKRVEDIHPTVPNPYNLLSGLPPSHQWYTVLDLKDAFFCLRLHPTSQSLFAFEWRDPEMGISGQLTWTRLPQGFKNSPTLFNEALHRDLADFRIQHPDLILLQYVDDLLLAATSELDCQQGTRALLQTLGDLGYRASAKKAQICQKQVKYLGYLLKEGQRWLTEARKETVMGQPTPKTPRQLREFLGTAGFCRLWIPGFAEMAAPLYPLTKPGTLFEWGPDQQKAYQEIKQALLTAPALGLPDLTKPFELFVDEKQGYAKGVLTQKLGPWRRPVAYLSKKLDPVAAGWPPCLRMVAAIAVLTKDAGKLTMGQPLVILAPHAVEALVKQPPDRWLSNARMTHYQALLLDTDRVQFGPIVALNPATLLPLPEEGLQHDCLDILAEAHGTRPDLTDQPLPDADHTWYTDGSSFLQEGQRKAGAAVTTETEVVWAKALPAGTSAQRAELIALTQALKMAEGKKLNVYTDSRYAFATAHIHGEIYRRRGWLTSEGKEIKNKDEILALLKALFLPKRLSIIHCPGHQKGNRAEARGNRMADQAAREVATRETPETSTLLAGKRTADGSEFEKRTADGSEFESPKKKAKVE

SEQ ID NO: 7678 - protein, 2120 aa, synthetic construct
MPAAKRVKLDGGDKKYSIGLDIGTNSVGWAVITDEYKVPSKKFKVLGNTDRHSIKKNLIGALLFDSGETAEATRLKRTARRRYTRRKNRICYLQEIFSNEMAKVDDSFFHRLEESFLVEEDKKHERHPIFGNIVDEVAYHEKYPTIYHLRKKLVDSTDKADLRLIYLALAHMIKFRGHFLIEGDLNPDNSDVDKLFIQLVQTYNQLFEENPINASGVDAKAILSARLSKSRRLENLIAQLPGEKKNGLFGNLIALSLGLTPNFKSNFDLAEDAKLQLSKDTYDDDLDNLLAQIGDQYADLFLAAKNLSDAILLSDILRVNTEITKAPLSASMIKRYDEHHQDLTLLKALVRQQLPEKYKEIFFDQSKNGYAGYIDGGASQEEFYKFIKPILEKMDGTEELLVKLNREDLLRKQRTFDNGSIPHQIHLGELHAILRRQEDFYPFLKDNREKIEKILTFRIPYYVGPLARGNSRFAWMTRKSEETITPWNFEEVVDKGASAQSFIERMTNFDKNLPNEKVLPKHSLLYEYFTVYNELTKVKYVTEGMRKPAFLSGEQKKAIVDLLFKTNRKVTVKQLKEDYFKKIECFDSVEISGVEDRFNASLGTYHDLLKIIKDKDFLDNEENEDILEDIVLTLTLFEDREMIEERLKTYAHLFDDKVMKQLKRRRYTGWGRLSRKLINGIRDKQSGKTILDFLKSDGFANRNFMQLIHDDSLTFKEDIQKAQVSGQGDSLHEHIANLAGSPAIKKGILQTVKVVDELVKVMGRHKPENIVIEMARENQTTQKGQKNSRERMKRIEEGIKELGSQILKEHPVENTQLQNEKLYLYYLQNGRDMYVDQELDINRLSDYDVDHIVPQSFLKDDSIDNKVLTRSDKARGKSDNVPSEEVVKKMKNYWRQLLNAKLITQRKFDNLTKAERGGLSELDKAGFIKRQLVETRQITKHVAQILDSRMNTKYDENDKLIREVKVITLKSKLVSDFRKDFQFYKVREINNYHHAHDAYLNAVVGTALIKKYPKLESEFVYGDYKVYDVRKMIAKSEQEIGKATAKYFFYSNIMNFFKTEITLANGEIRKRPLIETNGETGEIVWDKGRDFATVRKVLSMPQVNIVKKTEVQTGGFSKESILPKRNSDKLIARKKDWDPKKYGGFDSPTVAYSVLVVAKVEKGKSKKLKSVKELLGITIMERSSFEKNPIDFLEAKGYKEVKKDLIIKLPKYSLFELENGRKRMLASAGELQKGNELALPSKYVNFLYLASHYEKLKGSPEDNEQKQLFVEQHKHYLDEIIEQISEFSKRVILADANLDKVLSAYNKHRDKPIREQAENIIHLFTLTNLGAPAAFKYFDTTIDRKRYTSTKEVLDATLIHQSITGLYETRIDLSQLGGDGGGGGGSEAAAKGGGGSGGVQEISDSRPMLHIYLNGRRFLGLLDTGADKTCIAGRDWPANWPIHQTESSLQGLGMACGVARSSQPLRWQHEDKSGIIHPFVIPTLPFTLWGRDIMKDIKVRLMTDSPDDSQDLMIGAIESNLFADQISWKSDQPVWLNQWPLKQEKLQALQQLVTEQLQLGHLEESNSPWNTPVFVIKKKSGKWRLLQDLRAVNATMHDMGALQPGLPSPPAVPKGWEIIIIDLQDCFFNIKLHPEDCKRFAFSVPSPNFKRPYQRFQWKVLPQGMKNSPTLCQKFVDKAILTVRDKYQDSYIVHYMDDILLAHPSRSIVDEILTSMIQALNKHGLVVSTEKIQKYDNLKYLGTHIQGDSVSYQKLQIRTDKLRTLNDFQKLLGNINWIRPFLKLTTGELKPLFEILNPDSNPISTRKLTPEACKALQLMNERLSTARVKRLDLSQPWSLCILKTEYTPTACLWQDGVVEWIHLPHISPKVITPYDIFCTQLIIKGRHRSKELFSKDPDYIVVPYTKVQFDLLLQEKEDWPISLLGFLGEVHFHLPKDPLLTFTLQTAIIFPHMTSTTPLEKGIVIFTDGSANGRSVTYIQGREPIIKENTQNTAQQAEIVAVITAFEEVSQPFNLYTDSKYVTGLFPEIETATLSPRTKIYTELKHLQRLIHKRQEKFYIGHIRGHTGLPGPLAQGNAYADSLTRILTAAGKRTADGSEFEKRTADGSEFESPKKKAKVE

SEQ ID NO: 7679 - protein, 2098 aa, synthetic construct
MPAAKRVKLDGGDKKYSIGLDIGTNSVGWAVITDEYKVPSKKFKVLGNTDRHSIKKNLIGALLFDSGETAEATRLKRTARRRYTRRKNRICYLQEIFSNEMAKVDDSFFHRLEESFLVEEDKKHERHPIFGNIVDEVAYHEKYPTIYHLRKKLVDSTDKADLRLIYLALAHMIKFRGHFLIEGDLNPDNSDVDKLFIQLVQTYNQLFEENPINASGVDAKAILSARLSKSRRLENLIAQLPGEKKNGLFGNLIALSLGLTPNFKSNFDLAEDAKLQLSKDTYDDDLDNLLAQIGDQYADLFLAAKNLSDAILLSDILRVNTEITKAPLSASMIKRYDEHHQDLTLLKALVRQQLPEKYKEIFFDQSKNGYAGYIDGGASQEEFYKFIKPILEKMDGTEELLVKLNREDLLRKQRTFDNGSIPHQIHLGELHAILRRQEDFYPFLKDNREKIEKILTFRIPYYVGPLARGNSRFAWMTRKSEETITPWNFEEVVDKGASAQSFIERMTNFDKNLPNEKVLPKHSLLYEYFTVYNELTKVKYVTEGMRKPAFLSGEQKKAIVDLLFKTNRKVTVKQLKEDYFKKIECFDSVEISGVEDRFNASLGTYHDLLKIIKDKDFLDNEENEDILEDIVLTLTLFEDREMIEERLKTYAHLFDDKVMKQLKRRRYTGWGRLSRKLINGIRDKQSGKTILDFLKSDGFANRNFMQLIHDDSLTFKEDIQKAQVSGQGDSLHEHIANLAGSPAIKKGILQTVKVVDELVKVMGRHKPENIVIEMARENQTTQKGQKNSRERMKRIEEGIKELGSQILKEHPVENTQLQNEKLYLYYLQNGRDMYVDQELDINRLSDYDVDHIVPQSFLKDDSIDNKVLTRSDKARGKSDNVPSEEVVKKMKNYWRQLLNAKLITQRKFDNLTKAERGGLSELDKAGFIKRQLVETRQITKHVAQILDSRMNTKYDENDKLIREVKVITLKSKLVSDFRKDFQFYKVREINNYHHAHDAYLNAVVGTALIKKYPKLESEFVYGDYKVYDVRKMIAKSEQEIGKATAKYFFYSNIMNFFKTEITLANGEIRKRPLIETNGETGEIVWDKGRDFATVRKVLSMPQVNIVKKTEVQTGGFSKESILPKRNSDKLIARKKDWDPKKYGGFDSPTVAYSVLVVAKVEKGKSKKLKSVKELLGITIMERSSFEKNPIDFLEAKGYKEVKKDLIIKLPKYSLFELENGRKRMLASAGELQKGNELALPSKYVNFLYLASHYEKLKGSPEDNEQKQLFVEQHKHYLDEIIEQISEFSKRVILADANLDKVLSAYNKHRDKPIREQAENIIHLFTLTNLGAPAAFKYFDTTIDRKRYTSTKEVLDATLIHQSITGLYETRIDLSQLGGDGGGGGGSEAAAKGGGGSGGVLNLEEEYRLHEKPVPSSIDPSWLQLFPTVWAERAGMGLANQVPPVVVELRSGASPVAVRQYPMSKEAREGIRPHIQRFLDLGVLVPCQSPWNTPLLPVKKPGTNDYRPVQDLREINKRVQDIHPTVPNPYNLLSSLPPSHTWYSVLDLKDAFFCLKLHPNSQPLFAFEWRDPEKGNTGQLTWTRLPQGFKNSPTLFNEALHRDLAPFRALNPQVVLLQYVDDLLVAAPTYRDCKEGTQKLLQELSKLGYRVSAKKAQLCQKEVTYLGYLLKEGKRWLTPARKATVMKIPPPTTPRQVREFLGTAGFCRLWIPGFASLAAPLYPLTKPSIPFIWTEEHQKAFDRIKEALLSAPALALPDLTKPFTLYVDERAGVARGVLTQTLGPWRRPVAYLSKKLDPVASGWPTCLKAVAAVALLLKDADKLTLGQNVTVIASHSLESIVRQPPDRWMTNARMTHYQSLLLNERVSFAPPAVLNPATLLPVESEATPVHRCSEILAEETGTRRDLKDQPLPGVPAWYTDGSSFIAEGKRRAGAAIVDGKRTVWASSLPEGTSAQKAELVALTQALRLAEGKDINIYTDSRYAFATAHIHGAIYKQRGWLTSAGKDIKNKEEILALLEAIHLPKRVAIIHCPGHQKGNDPVATGNRRADEAAKQAALSTRVLAETTKPAGKRTADGSEFEKRTADGSEFESPKKKAKVE

SEQ ID NO: 7680 - protein, 2102 aa, synthetic construct
MPAAKRVKLDGGDKKYSIGLDIGTNSVGWAVITDEYKVPSKKFKVLGNTDRHSIKKNLIGALLFDSGETAEATRLKRTARRRYTRRKNRICYLQEIFSNEMAKVDDSFFHRLEESFLVEEDKKHERHPIFGNIVDEVAYHEKYPTIYHLRKKLVDSTDKADLRLIYLALAHMIKFRGHFLIEGDLNPDNSDVDKLFIQLVQTYNQLFEENPINASGVDAKAILSARLSKSRRLENLIAQLPGEKKNGLFGNLIALSLGLTPNFKSNFDLAEDAKLQLSKDTYDDDLDNLLAQIGDQYADLFLAAKNLSDAILLSDILRVNTEITKAPLSASMIKRYDEHHQDLTLLKALVRQQLPEKYKEIFFDQSKNGYAGYIDGGASQEEFYKFIKPILEKMDGTEELLVKLNREDLLRKQRTFDNGSIPHQIHLGELHAILRRQEDFYPFLKDNREKIEKILTFRIPYYVGPLARGNSRFAWMTRKSEETITPWNFEEVVDKGASAQSFIERMTNFDKNLPNEKVLPKHSLLYEYFTVYNELTKVKYVTEGMRKPAFLSGEQKKAIVDLLFKTNRKVTVKQLKEDYFKKIECFDSVEISGVEDRFNASLGTYHDLLKIIKDKDFLDNEENEDILEDIVLTLTLFEDREMIEERLKTYAHLFDDKVMKQLKRRRYTGWGRLSRKLINGIRDKQSGKTILDFLKSDGFANRNFMQLIHDDSLTFKEDIQKAQVSGQGDSLHEHIANLAGSPAIKKGILQTVKVVDELVKVMGRHKPENIVIEMARENQTTQKGQKNSRERMKRIEEGIKELGSQILKEHPVENTQLQNEKLYLYYLQNGRDMYVDQELDINRLSDYDVDHIVPQSFLKDDSIDNKVLTRSDKARGKSDNVPSEEVVKKMKNYWRQLLNAKLITQRKFDNLTKAERGGLSELDKAGFIKRQLVETRQITKHVAQILDSRMNTKYDENDKLIREVKVITLKSKLVSDFRKDFQFYKVREINNYHHAHDAYLNAVVGTALIKKYPKLESEFVYGDYKVYDVRKMIAKSEQEIGKATAKYFFYSNIMNFFKTEITLANGEIRKRPLIETNGETGEIVWDKGRDFATVRKVLSMPQVNIVKKTEVQTGGFSKESILPKRNSDKLIARKKDWDPKKYGGFDSPTVAYSVLVVAKVEKGKSKKLKSVKELLGITIMERSSFEKNPIDFLEAKGYKEVKKDLIIKLPKYSLFELENGRKRMLASAGELQKGNELALPSKYVNFLYLASHYEKLKGSPEDNEQKQLFVEQHKHYLDEIIEQISEFSKRVILADANLDKVLSAYNKHRDKPIREQAENIIHLFTLTNLGAPAAFKYFDTTIDRKRYTSTKEVLDATLIHQSITGLYETRIDLSQLGGDGGEAAAKGGGGSEAAAKGGTAPLEEEYRLFLEAPIQNVTLLEQWKREIPKVWAEINPPGLASTQAPIHVQLLSTALPVRVRQYPITLEAKRSLRETIRKFRAAGILRPVHSPWNTPLLPVRKSGTSEYRMVQDLREVNKRVETIHPTVPNPYTLLSLLPPDRIWYSVLDLKDAFFCIPLAPESQLIFAFEWADAEEGESGQLTWTRLPQGFKNSPTLFDEALNRDLQGFRLDHPSVSLLQYVDDLLIAADTQAACLSATRDLLMTLAELGYRVSGKKAQLCQEEVTYLGFKIHKGSRSLSNSRTQAILQIPVPKTKRQVREFLGTIGYCRLWIPGFAELAQPLYAATRGGNDPLVWGEKEEEAFQSLKLALTQPPALALPSLDKPFQLFVEETSGAAKGVLTQALGPWKRPVAYLSKRLDPVAAGWPRCLRAIAAAALLTREASKLTFGQDIEITSSHNLESLLRSPPDKWLTNARITQYQVLLLDPPRVRFKQTAALNPATLLPETDDTLPIHHCLDTLDSLTSTRPDLTDQPLAQAEATLFTDGSSYIRDGKRYAGAAVVTLDSVIWAEPLPIGTSAQKAELIALTKALEWSKDKSVNIYTDSRYAFATLHVHGMIYRERGLLTAGGKAIKNAPEILALLTAVWLPKRVAVMHCKGHQKDDAPTSTGNRRADEVAREVAIRPLSTQATISAGKRTADGSEFEKRTADGSEFESPKKKAKVE

SEQ ID NO: 7681 - protein, 2098 aa, synthetic construct
MPAAKRVKLDGGDKKYSIGLDIGTNSVGWAVITDEYKVPSKKFKVLGNTDRHSIKKNLIGALLFDSGETAEATRLKRTARRRYTRRKNRICYLQEIFSNEMAKVDDSFFHRLEESFLVEEDKKHERHPIFGNIVDEVAYHEKYPTIYHLRKKLVDSTDKADLRLIYLALAHMIKFRGHFLIEGDLNPDNSDVDKLFIQLVQTYNQLFEENPINASGVDAKAILSARLSKSRRLENLIAQLPGEKKNGLFGNLIALSLGLTPNFKSNFDLAEDAKLQLSKDTYDDDLDNLLAQIGDQYADLFLAAKNLSDAILLSDILRVNTEITKAPLSASMIKRYDEHHQDLTLLKALVRQQLPEKYKEIFFDQSKNGYAGYIDGGASQEEFYKFIKPILEKMDGTEELLVKLNREDLLRKQRTFDNGSIPHQIHLGELHAILRRQEDFYPFLKDNREKIEKILTFRIPYYVGPLARGNSRFAWMTRKSEETITPWNFEEVVDKGASAQSFIERMTNFDKNLPNEKVLPKHSLLYEYFTVYNELTKVKYVTEGMRKPAFLSGEQKKAIVDLLFKTNRKVTVKQLKEDYFKKIECFDSVEISGVEDRFNASLGTYHDLLKIIKDKDFLDNEENEDILEDIVLTLTLFEDREMIEERLKTYAHLFDDKVMKQLKRRRYTGWGRLSRKLINGIRDKQSGKTILDFLKSDGFANRNFMQLIHDDSLTFKEDIQKAQVSGQGDSLHEHIANLAGSPAIKKGILQTVKVVDELVKVMGRHKPENIVIEMARENQTTQKGQKNSRERMKRIEEGIKELGSQILKEHPVENTQLQNEKLYLYYLQNGRDMYVDQELDINRLSDYDVDHIVPQSFLKDDSIDNKVLTRSDKARGKSDNVPSEEVVKKMKNYWRQLLNAKLITQRKFDNLTKAERGGLSELDKAGFIKRQLVETRQITKHVAQILDSRMNTKYDENDKLIREVKVITLKSKLVSDFRKDFQFYKVREINNYHHAHDAYLNAVVGTALIKKYPKLESEFVYGDYKVYDVRKMIAKSEQEIGKATAKYFFYSNIMNFFKTEITLANGEIRKRPLIETNGETGEIVWDKGRDFATVRKVLSMPQVNIVKKTEVQTGGFSKESILPKRNSDKLIARKKDWDPKKYGGFDSPTVAYSVLVVAKVEKGKSKKLKSVKELLGITIMERSSFEKNPIDFLEAKGYKEVKKDLIIKLPKYSLFELENGRKRMLASAGELQKGNELALPSKYVNFLYLASHYEKLKGSPEDNEQKQLFVEQHKHYLDEIIEQISEFSKRVILADANLDKVLSAYNKHRDKPIREQAENIIHLFTLTNLGAPAAFKYFDTTIDRKRYTSTKEVLDATLIHQSITGLYETRIDLSQLGGDGGEAAAKGGGGSEAAAKGGVLNLEEEYRLHEKPVPSSIDPSWLQLFPTVWAERAGMGLANQVPPVVVELRSGASPVAVRQYPMSKEAREGIRPHIQKFLDLGVLVPCRSPWNTPLLPVKKPGTNDYRPVQDLREINKRVQDIHPTVPNPYNLLSSLPPSYTWYSVLDLKDAFFCLRLHPNSQPLFAFEWKDPEKGNTGQLTWTRLPQGFKNSPTLFNEALHRDLAPFRALNPQVVLLQYVDDLLVAAPTYEDCKKGTQKLLQELSKLGYRVSAKKAQLCQREVTYLGYLLKEGKRWLTPARKATVMKIPVPTTPRQVREFLGTAGFCRLWIPGFASLAAPLYPLTKPSIPFIWTEEHQQAFDHIKKALLSAPALALPDLTKPFTLYIDERAGVARGVLTQTLGPWRRPVAYLSKKLDPVASGWPTCLKAVAAVALLLKDADKLTLGQNVTVIASHSLESIVRQPPDRWMTNARMTHYQSLLLNERVSFAPPAVLNPATLLPVESEATPVHRCSEILAEETGTRRDLEDQPLPGVPTWYTDGSSFITEGKRRAGAPIVDGKRTVWASSLPEGTSAQKAELVALTQALRLAEGKNINIYTDSRYAFATAHIHGAIYKQRGWLTSAGKDIKNKEEILALLEAIHLPRRVAIIHCPGHQRGSNPVATGNRRADEAAKQAALSTRVLAGTTKPAGKRTADGSEFEKRTADGSEFESPKKKAKVE

SEQ ID NO: 7682 - protein, 2222 aa, synthetic construct
MPAAKRVKLDGGDKKYSIGLDIGTNSVGWAVITDEYKVPSKKFKVLGNTDRHSIKKNLIGALLFDSGETAEATRLKRTARRRYTRRKNRICYLQEIFSNEMAKVDDSFFHRLEESFLVEEDKKHERHPIFGNIVDEVAYHEKYPTIYHLRKKLVDSTDKADLRLIYLALAHMIKFRGHFLIEGDLNPDNSDVDKLFIQLVQTYNQLFEENPINASGVDAKAILSARLSKSRRLENLIAQLPGEKKNGLFGNLIALSLGLTPNFKSNFDLAEDAKLQLSKDTYDDDLDNLLAQIGDQYADLFLAAKNLSDAILLSDILRVNTEITKAPLSASMIKRYDEHHQDLTLLKALVRQQLPEKYKEIFFDQSKNGYAGYIDGGASQEEFYKFIKPILEKMDGTEELLVKLNREDLLRKQRTFDNGSIPHQIHLGELHAILRRQEDFYPFLKDNREKIEKILTFRIPYYVGPLARGNSRFAWMTRKSEETITPWNFEEVVDKGASAQSFIERMTNFDKNLPNEKVLPKHSLLYEYFTVYNELTKVKYVTEGMRKPAFLSGEQKKAIVDLLFKTNRKVTVKQLKEDYFKKIECFDSVEISGVEDRFNASLGTYHDLLKIIKDKDFLDNEENEDILEDIVLTLTLFEDREMIEERLKTYAHLFDDKVMKQLKRRRYTGWGRLSRKLINGIRDKQSGKTILDFLKSDGFANRNFMQLIHDDSLTFKEDIQKAQVSGQGDSLHEHIANLAGSPAIKKGILQTVKVVDELVKVMGRHKPENIVIEMARENQTTQKGQKNSRERMKRIEEGIKELGSQILKEHPVENTQLQNEKLYLYYLQNGRDMYVDQELDINRLSDYDVDHIVPQSFLKDDSIDNKVLTRSDKARGKSDNVPSEEVVKKMKNYWRQLLNAKLITQRKFDNLTKAERGGLSELDKAGFIKRQLVETRQITKHVAQILDSRMNTKYDENDKLIREVKVITLKSKLVSDFRKDFQFYKVREINNYHHAHDAYLNAVVGTALIKKYPKLESEFVYGDYKVYDVRKMIAKSEQEIGKATAKYFFYSNIMNFFKTEITLANGEIRKRPLIETNGETGEIVWDKGRDFATVRKVLSMPQVNIVKKTEVQTGGFSKESILPKRNSDKLIARKKDWDPKKYGGFDSPTVAYSVLVVAKVEKGKSKKLKSVKELLGITIMERSSFEKNPIDFLEAKGYKEVKKDLIIKLPKYSLFELENGRKRMLASAGELQKGNELALPSKYVNFLYLASHYEKLKGSPEDNEQKQLFVEQHKHYLDEIIEQISEFSKRVILADANLDKVLSAYNKHRDKPIREQAENIIHLFTLTNLGAPAAFKYFDTTIDRKRYTSTKEVLDATLIHQSITGLYETRIDLSQLGGDGGEAAAKGGGGSEAAAKGGTLGDQGSRGSDPLPEPRVTLTVEGIPTEFLVNTGAEHSVLTKPMGKMGSKRTVVAGATGSKVYPWTTKRLLKIGQKQVTHSFLVIPECPAPLLGRDLLTKLKAQIQFSTEGPQVTWEDRPAMCLVLNLEEEYRLHEKPVPPSIDPSWLQLFPMVWAEKAGMGLANQVPPVVVELKSDASPVAVRQYPMSKEAREGIRPHIQRFLDLGILVPCQSPWNTPLLPVKKPGTNDYRPVQDLREVNKRVQDIHPTVPNPYNLLSSLPPSHTWYSVLDLKDAFFCLKLHPNSQPLFAFEWRDPEKGNTGQLTWTRLPQGFKNSPTLFNEALHRDLASFRALNPQVVMLQYVDDLLVAAPTYRDCKEGTRRLLQELSKLGYRVSAKKAQLCREEVTYLGYLLKGGKRWLTPARKATVMKIPTPTTPRQVREFLGTAGFCRLWIPGFASLAAPLYPLTRPKVPFTWTEAHQEAFGRIKEALLSAPALALPDLTKPFALYVDEKEGVARGVLTQTLGPWRRPVAYLSKKLDPVASGWPTCLKAIAAVALLLKDADKLTLGQNVLVIAPHNLESIVRQPPDRWMTNARMTHYQSLLLNERVSFAPPAILNPATLLPVESDDTPIHICSEILAEETGTRPDLRDQPLPGVPAWYTDGSSFIMDGRRQAGAAIVDNKRTVWASNLPEGTSAQKAELIALTQALRLAEGKSINIYTDSRYAFATAHVHGAIYKQRGWLTSAGKDIKNKEEILALLEAIHLPKRVAIIHCPGHQRGTDPVATGNRKADEAAKQAAQSTRILTETTKNAGKRTADGSEFEKRTADGSEFESPKKKAKVE

SEQ ID NO: 7683 - protein, 2100 aa, synthetic construct
MPAAKRVKLDGGDKKYSIGLDIGTNSVGWAVITDEYKVPSKKFKVLGNTDRHSIKKNLIGALLFDSGETAEATRLKRTARRRYTRRKNRICYLQEIFSNEMAKVDDSFFHRLEESFLVEEDKKHERHPIFGNIVDEVAYHEKYPTIYHLRKKLVDSTDKADLRLIYLALAHMIKFRGHFLIEGDLNPDNSDVDKLFIQLVQTYNQLFEENPINASGVDAKAILSARLSKSRRLENLIAQLPGEKKNGLFGNLIALSLGLTPNFKSNFDLAEDAKLQLSKDTYDDDLDNLLAQIGDQYADLFLAAKNLSDAILLSDILRVNTEITKAPLSASMIKRYDEHHQDLTLLKALVRQQLPEKYKEIFFDQSKNGYAGYIDGGASQEEFYKFIKPILEKMDGTEELLVKLNREDLLRKQRTFDNGSIPHQIHLGELHAILRRQEDFYPFLKDNREKIEKILTFRIPYYVGPLARGNSRFAWMTRKSEETITPWNFEEVVDKGASAQSFIERMTNFDKNLPNEKVLPKHSLLYEYFTVYNELTKVKYVTEGMRKPAFLSGEQKKAIVDLLFKTNRKVTVKQLKEDYFKKIECFDSVEISGVEDRFNASLGTYHDLLKIIKDKDFLDNEENEDILEDIVLTLTLFEDREMIEERLKTYAHLFDDKVMKQLKRRRYTGWGRLSRKLINGIRDKQSGKTILDFLKSDGFANRNFMQLIHDDSLTFKEDIQKAQVSGQGDSLHEHIANLAGSPAIKKGILQTVKVVDELVKVMGRHKPENIVIEMARENQTTQKGQKNSRERMKRIEEGIKELGSQILKEHPVENTQLQNEKLYLYYLQNGRDMYVDQELDINRLSDYDVDHIVPQSFLKDDSIDNKVLTRSDKARGKSDNVPSEEVVKKMKNYWRQLLNAKLITQRKFDNLTKAERGGLSELDKAGFIKRQLVETRQITKHVAQILDSRMNTKYDENDKLIREVKVITLKSKLVSDFRKDFQFYKVREINNYHHAHDAYLNAVVGTALIKKYPKLESEFVYGDYKVYDVRKMIAKSEQEIGKATAKYFFYSNIMNFFKTEITLANGEIRKRPLIETNGETGEIVWDKGRDFATVRKVLSMPQVNIVKKTEVQTGGFSKESILPKRNSDKLIARKKDWDPKKYGGFDSPTVAYSVLVVAKVEKGKSKKLKSVKELLGITIMERSSFEKNPIDFLEAKGYKEVKKDLIIKLPKYSLFELENGRKRMLASAGELQKGNELALPSKYVNFLYLASHYEKLKGSPEDNEQKQLFVEQHKHYLDEIIEQISEFSKRVILADANLDKVLSAYNKHRDKPIREQAENIIHLFTLTNLGAPAAFKYFDTTIDRKRYTSTKEVLDATLIHQSITGLYETRIDLSQLGGDGGEAAAKGGGGSEAAAKGGTLNLEDEYRLYETSAEPEVSPGSTWLSDFPQAWAETGGMGLAVRQAPLIIPLKATSTPVSIKQYPMSQEAKLGIKPHIQRLLDQGILVPCQSPWNTPLLPVKKPGTNDYRPVQDLREVNKRVEDIHPTVPNPYNLLSGLPPSHRWYTVLDLKDAFFCLRLHPTSQPLFAFEWRDPGMGISGQLTWTRLPQGFKNSPTLFNEALHRDLADFRIQHPDLILLQYVDDILLAATSELDCQQGTRALLLTLGNLGYRASAKKAQLCQKQVKYLGYLLKEGQRWLTEARKETVMGQPTPKTPRQLREFLGTAGFCRLWIPGFAEMAAPLYPLTKPGTLFNWGPDQQKAYQEIKQALLTAPALGLPDLTKPFELFVDEKQGYAKGVLTQKLGPWRRPVAYLSKKLDPVAAGWPPCLRMVAAIAVLRKDAGKLTMGQPLVILAPHAVEALVKQPPDRWLSNARMTHYQAMLLDTDRVQFGPVVALNPATLLPLPEEGAPHDCLEILAETHGTRPDLTDQPIPDADHTWYTDGSSFLQEGQRKAGAAVTTETEVIWARALPAGTSAQRAELIALTQALKMAEGKRLNVYTDSRYAFATAHIHGEIYRRRGWLTSEGREIKNKSEILALLKALFLPKRLSIIHCLGHQKGDSAEARGNRLADQAAREAAIKTPPDTSTLLAGKRTADGSEFEKRTADGSEFESPKKKAKVE

SEQ ID NO: 7684 - protein, 2100 aa, synthetic construct
MPAAKRVKLDGGDKKYSIGLDIGTNSVGWAVITDEYKVPSKKFKVLGNTDRHSIKKNLIGALLFDSGETAEATRLKRTARRRYTRRKNRICYLQEIFSNEMAKVDDSFFHRLEESFLVEEDKKHERHPIFGNIVDEVAYHEKYPTIYHLRKKLVDSTDKADLRLIYLALAHMIKFRGHFLIEGDLNPDNSDVDKLFIQLVQTYNQLFEENPINASGVDAKAILSARLSKSRRLENLIAQLPGEKKNGLFGNLIALSLGLTPNFKSNFDLAEDAKLQLSKDTYDDDLDNLLAQIGDQYADLFLAAKNLSDAILLSDILRVNTEITKAPLSASMIKRYDEHHQDLTLLKALVRQQLPEKYKEIFFDQSKNGYAGYIDGGASQEEFYKFIKPILEKMDGTEELLVKLNREDLLRKQRTFDNGSIPHQIHLGELHAILRRQEDFYPFLKDNREKIEKILTFRIPYYVGPLARGNSRFAWMTRKSEETITPWNFEEVVDKGASAQSFIERMTNFDKNLPNEKVLPKHSLLYEYFTVYNELTKVKYVTEGMRKPAFLSGEQKKAIVDLLFKTNRKVTVKQLKEDYFKKIECFDSVEISGVEDRFNASLGTYHDLLKIIKDKDFLDNEENEDILEDIVLTLTLFEDREMIEERLKTYAHLFDDKVMKQLKRRRYTGWGRLSRKLINGIRDKQSGKTILDFLKSDGFANRNFMQLIHDDSLTFKEDIQKAQVSGQGDSLHEHIANLAGSPAIKKGILQTVKVVDELVKVMGRHKPENIVIEMARENQTTQKGQKNSRERMKRIEEGIKELGSQILKEHPVENTQLQNEKLYLYYLQNGRDMYVDQELDINRLSDYDVDHIVPQSFLKDDSIDNKVLTRSDKARGKSDNVPSEEVVKKMKNYWRQLLNAKLITQRKFDNLTKAERGGLSELDKAGFIKRQLVETRQITKHVAQILDSRMNTKYDENDKLIREVKVITLKSKLVSDFRKDFQFYKVREINNYHHAHDAYLNAVVGTALIKKYPKLESEFVYGDYKVYDVRKMIAKSEQEIGKATAKYFFYSNIMNFFKTEITLANGEIRKRPLIETNGETGEIVWDKGRDFATVRKVLSMPQVNIVKKTEVQTGGFSKESILPKRNSDKLIARKKDWDPKKYGGFDSPTVAYSVLVVAKVEKGKSKKLKSVKELLGITIMERSSFEKNPIDFLEAKGYKEVKKDLIIKLPKYSLFELENGRKRMLASAGELQKGNELALPSKYVNFLYLASHYEKLKGSPEDNEQKQLFVEQHKHYLDEIIEQISEFSKRVILADANLDKVLSAYNKHRDKPIREQAENIIHLFTLTNLGAPAAFKYFDTTIDRKRYTSTKEVLDATLIHQSITGLYETRIDLSQLGGDGGEAAAKGGGGSEAAAKGGTLGIEDEYRLHETSTEPDVSLGSTWLSDFPQAWAETGGMGLAVRQAPLIIPLKATSTPVSIQQYPMSHEARLGIKPHIQRLLDQGILVPCQSPWNTPLLPVKKPGTNDYRPVQDLREVNKRVEDIHPTVPNPYNLLSGLPPSHQWYTVLDLKDAFFCLRLHPTSQPLFAFEWRDPGMGISGQLTWTRLPQGFKNSPTLFNEALHRDLADFRIQHPDLILLQYVDDILLAATSELDCQQGTRALLQTLGDLGYRASAKKAQICQKQVKYLGYLLREGQRWLTEARKETVMGQPVPKTPRQLREFLGTAGFCRLWIPGFAEMAAPLYPLTKPGTLFSWGPDQQKAYQEIKQALLTAPALGLPDLTKPFELFVDEKQGYAKGVLTQKLGPWRRPVAYLSKKLDPVAAGWPPCLRMVAAIAVLTKDAGKLTMGQPLVILAPHAVEALVKQPPDRWLSNARMTHYQAMLLDTDRVQFGPVVALNPATLLPLPEEGAPHDCLEILAETHGTRPDLTDQPIPDADHTWYTDGSSFLQEGQRKAGAAVTTETEVIWAGALPAGTSAQRAELIALTQALKMAEGKRLNVYTDSRYAFATAHIHGEIYRRRGWLTSEGREIKNKSEILALLKALFLPKRLSIIHCLGHQKGDSAEARGNRLADQAAREAAIKTPPDTSTLLAGKRTADGSEFEKRTADGSEFESPKKKAKVE

SEQ ID NO: 7685 - protein, 2100 aa, synthetic construct
MPAAKRVKLDGGDKKYSIGLDIGTNSVGWAVITDEYKVPSKKFKVLGNTDRHSIKKNLIGALLFDSGETAEATRLKRTARRRYTRRKNRICYLQEIFSNEMAKVDDSFFHRLEESFLVEEDKKHERHPIFGNIVDEVAYHEKYPTIYHLRKKLVDSTDKADLRLIYLALAHMIKFRGHFLIEGDLNPDNSDVDKLFIQLVQTYNQLFEENPINASGVDAKAILSARLSKSRRLENLIAQLPGEKKNGLFGNLIALSLGLTPNFKSNFDLAEDAKLQLSKDTYDDDLDNLLAQIGDQYADLFLAAKNLSDAILLSDILRVNTEITKAPLSASMIKRYDEHHQDLTLLKALVRQQLPEKYKEIFFDQSKNGYAGYIDGGASQEEFYKFIKPILEKMDGTEELLVKLNREDLLRKQRTFDNGSIPHQIHLGELHAILRRQEDFYPFLKDNREKIEKILTFRIPYYVGPLARGNSRFAWMTRKSEETITPWNFEEVVDKGASAQSFIERMTNFDKNLPNEKVLPKHSLLYEYFTVYNELTKVKYVTEGMRKPAFLSGEQKKAIVDLLFKTNRKVTVKQLKEDYFKKIECFDSVEISGVEDRFNASLGTYHDLLKIIKDKDFLDNEENEDILEDIVLTLTLFEDREMIEERLKTYAHLFDDKVMKQLKRRRYTGWGRLSRKLINGIRDKQSGKTILDFLKSDGFANRNFMQLIHDDSLTFKEDIQKAQVSGQGDSLHEHIANLAGSPAIKKGILQTVKVVDELVKVMGRHKPENIVIEMARENQTTQKGQKNSRERMKRIEEGIKELGSQILKEHPVENTQLQNEKLYLYYLQNGRDMYVDQELDINRLSDYDVDHIVPQSFLKDDSIDNKVLTRSDKARGKSDNVPSEEVVKKMKNYWRQLLNAKLITQRKFDNLTKAERGGLSELDKAGFIKRQLVETRQITKHVAQILDSRMNTKYDENDKLIREVKVITLKSKLVSDFRKDFQFYKVREINNYHHAHDAYLNAVVGTALIKKYPKLESEFVYGDYKVYDVRKMIAKSEQEIGKATAKYFFYSNIMNFFKTEITLANGEIRKRPLIETNGETGEIVWDKGRDFATVRKVLSMPQVNIVKKTEVQTGGFSKESILPKRNSDKLIARKKDWDPKKYGGFDSPTVAYSVLVVAKVEKGKSKKLKSVKELLGITIMERSSFEKNPIDFLEAKGYKEVKKDLIIKLPKYSLFELENGRKRMLASAGELQKGNELALPSKYVNFLYLASHYEKLKGSPEDNEQKQLFVEQHKHYLDEIIEQISEFSKRVILADANLDKVLSAYNKHRDKPIREQAENIIHLFTLTNLGAPAAFKYFDTTIDRKRYTSTKEVLDATLIHQSITGLYETRIDLSQLGGDGGEAAAKGGGGSEAAAKGGTLNIEDEYRLHETSKGPDVPLGSTWLSDFPQAWAETGGMGLAVRQAPLIIPLKATSTPVSIKQYPMSQEARLGIKPHIQRLLDQGILVPCQSPWNTPLLPVKKPGTNDYRPVQDLREVNKRVEDIHPTVPNPYNLLSGLPPSHQWYTVLDLKDAFFCLRLHPTSQSLFAFEWRDPEMGISGQLTWTRLPQGFKNSPTLFNEALHRDLADFRIQHPDLILLQYVDDLLLAATSELDCQQGTRALLQTLGDLGYRASAKKAQICQKQVKYLGYLLKEGQRWLTEARKETVMGQPTPKTPRQLREFLGTAGFCRLWIPGFAEMAAPLYPLTKPGTLFEWGPDQQKAYQEIKQALLTAPALGLPDLTKPFELFVDEKQGYAKGVLTQKLGPWRRPVAYLSKKLDPVAAGWPPCLRMVAAIAVLTKDAGKLTMGQPLVILAPHAVEALVKQPPDRWLSNARMTHYQALLLDTDRVQFGPIVALNPATLLPLPEEGLQHDCLDILAEAHGTRPDLTDQPLPDADHTWYTDGSSFLQEGQRKAGAAVTTETEVVWAKALPAGTSAQRAELIALTQALKMAEGKKLNVYTDSRYAFATAHIHGEIYRRRGWLTSEGKEIKNKDEILALLKALFLPKRLSIIHCPGHQKGNRAEARGNRMADQAAREVATRETPETSTLLAGKRTADGSEFEKRTADGSEFESPKKKAKVE

SEQ ID NO: 7686 - protein, 2100 aa, synthetic construct
MPAAKRVKLDGGDKKYSIGLDIGTNSVGWAVITDEYKVPSKKFKVLGNTDRHSIKKNLIGALLFDSGETAEATRLKRTARRRYTRRKNRICYLQEIFSNEMAKVDDSFFHRLEESFLVEEDKKHERHPIFGNIVDEVAYHEKYPTIYHLRKKLVDSTDKADLRLIYLALAHMIKFRGHFLIEGDLNPDNSDVDKLFIQLVQTYNQLFEENPINASGVDAKAILSARLSKSRRLENLIAQLPGEKKNGLFGNLIALSLGLTPNFKSNFDLAEDAKLQLSKDTYDDDLDNLLAQIGDQYADLFLAAKNLSDAILLSDILRVNTEITKAPLSASMIKRYDEHHQDLTLLKALVRQQLPEKYKEIFFDQSKNGYAGYIDGGASQEEFYKFIKPILEKMDGTEELLVKLNREDLLRKQRTFDNGSIPHQIHLGELHAILRRQEDFYPFLKDNREKIEKILTFRIPYYVGPLARGNSRFAWMTRKSEETITPWNFEEVVDKGASAQSFIERMTNFDKNLPNEKVLPKHSLLYEYFTVYNELTKVKYVTEGMRKPAFLSGEQKKAIVDLLFKTNRKVTVKQLKEDYFKKIECFDSVEISGVEDRFNASLGTYHDLLKIIKDKDFLDNEENEDILEDIVLTLTLFEDREMIEERLKTYAHLFDDKVMKQLKRRRYTGWGRLSRKLINGIRDKQSGKTILDFLKSDGFANRNFMQLIHDDSLTFKEDIQKAQVSGQGDSLHEHIANLAGSPAIKKGILQTVKVVDELVKVMGRHKPENIVIEMARENQTTQKGQKNSRERMKRIEEGIKELGSQILKEHPVENTQLQNEKLYLYYLQNGRDMYVDQELDINRLSDYDVDHIVPQSFLKDDSIDNKVLTRSDKARGKSDNVPSEEVVKKMKNYWRQLLNAKLITQRKFDNLTKAERGGLSELDKAGFIKRQLVETRQITKHVAQILDSRMNTKYDENDKLIREVKVITLKSKLVSDFRKDFQFYKVREINNYHHAHDAYLNAVVGTALIKKYPKLESEFVYGDYKVYDVRKMIAKSEQEIGKATAKYFFYSNIMNFFKTEITLANGEIRKRPLIETNGETGEIVWDKGRDFATVRKVLSMPQVNIVKKTEVQTGGFSKESILPKRNSDKLIARKKDWDPKKYGGFDSPTVAYSVLVVAKVEKGKSKKLKSVKELLGITIMERSSFEKNPIDFLEAKGYKEVKKDLIIKLPKYSLFELENGRKRMLASAGELQKGNELALPSKYVNFLYLASHYEKLKGSPEDNEQKQLFVEQHKHYLDEIIEQISEFSKRVILADANLDKVLSAYNKHRDKPIREQAENIIHLFTLTNLGAPAAFKYFDTTIDRKRYTSTKEVLDATLIHQSITGLYETRIDLSQLGGDGGEAAAKGGGGSEAAAKGGTLNIEDEYRLHEISTEPDVSPGSTWLSDFPQAWAETGGMGLAVRQAPLIIPLKATSTPVSIKQYPMSQEAKLGIKPHIQRLLDQGILVPCQSPWNTPLLPVKKPGTNDYRPVQGLREVNKRVEDIHPTVPNPYNLLSGLPTSHRWYTVLDLKDAFFCLRLHPTSQPLFASEWRDPGMGISGQLTWTRLPQGFKNSPTLFNEALHRGLADFRIQHPDLILLQYVDDLLLAATSELDCQQGTRALLKTLGNLGYRASAKKAQICQKQVKYLGYLLREGQRWLTEARKETVMGQPTPKTPRQLREFLGKAGFCRLFIPRFAEMAAPLYPLTKPGTLFNWGPDQQKAYHEIKQALLTAPALGLPDLTKPFELFVDEKQGYAKGVLTQKLGPWRRPVAYLSKKLDPVAAGWPPCLRMVAAIAVLTKDAGKLTMGQPLVILAPHAVEALVKQPPDRWLSNARMTHYQAMLLDTDRVQFGPVVALNPATLLPLPEEGAPHDCLEILAETHGTEPDLTDQPIPDADHTWYTDGSSFLQEGQRKAGAAVTTETEVIWARALPAGTSAQRAELIALTQALKMAEGKRLNVYTDSRYAFATAHIHGEIYKRRGWLTSEGREIKNKSEILALLKALFLPKRLSIIHCLGHQKGDSAEARGNRLADQAAREAAIKTPPDTSTLLAGKRTADGSEFEKRTADGSEFESPKKKAKVE

SEQ ID NO: 7687 - protein, 2098 aa, synthetic construct
MPAAKRVKLDGGDKKYSIGLDIGTNSVGWAVITDEYKVPSKKFKVLGNTDRHSIKKNLIGALLFDSGETAEATRLKRTARRRYTRRKNRICYLQEIFSNEMAKVDDSFFHRLEESFLVEEDKKHERHPIFGNIVDEVAYHEKYPTIYHLRKKLVDSTDKADLRLIYLALAHMIKFRGHFLIEGDLNPDNSDVDKLFIQLVQTYNQLFEENPINASGVDAKAILSARLSKSRRLENLIAQLPGEKKNGLFGNLIALSLGLTPNFKSNFDLAEDAKLQLSKDTYDDDLDNLLAQIGDQYADLFLAAKNLSDAILLSDILRVNTEITKAPLSASMIKRYDEHHQDLTLLKALVRQQLPEKYKEIFFDQSKNGYAGYIDGGASQEEFYKFIKPILEKMDGTEELLVKLNREDLLRKQRTFDNGSIPHQIHLGELHAILRRQEDFYPFLKDNREKIEKILTFRIPYYVGPLARGNSRFAWMTRKSEETITPWNFEEVVDKGASAQSFIERMTNFDKNLPNEKVLPKHSLLYEYFTVYNELTKVKYVTEGMRKPAFLSGEQKKAIVDLLFKTNRKVTVKQLKEDYFKKIECFDSVEISGVEDRFNASLGTYHDLLKIIKDKDFLDNEENEDILEDIVLTLTLFEDREMIEERLKTYAHLFDDKVMKQLKRRRYTGWGRLSRKLINGIRDKQSGKTILDFLKSDGFANRNFMQLIHDDSLTFKEDIQKAQVSGQGDSLHEHIANLAGSPAIKKGILQTVKVVDELVKVMGRHKPENIVIEMARENQTTQKGQKNSRERMKRIEEGIKELGSQILKEHPVENTQLQNEKLYLYYLQNGRDMYVDQELDINRLSDYDVDHIVPQSFLKDDSIDNKVLTRSDKARGKSDNVPSEEVVKKMKNYWRQLLNAKLITQRKFDNLTKAERGGLSELDKAGFIKRQLVETRQITKHVAQILDSRMNTKYDENDKLIREVKVITLKSKLVSDFRKDFQFYKVREINNYHHAHDAYLNAVVGTALIKKYPKLESEFVYGDYKVYDVRKMIAKSEQEIGKATAKYFFYSNIMNFFKTEITLANGEIRKRPLIETNGETGEIVWDKGRDFATVRKVLSMPQVNIVKKTEVQTGGFSKESILPKRNSDKLIARKKDWDPKKYGGFDSPTVAYSVLVVAKVEKGKSKKLKSVKELLGITIMERSSFEKNPIDFLEAKGYKEVKKDLIIKLPKYSLFELENGRKRMLASAGELQKGNELALPSKYVNFLYLASHYEKLKGSPEDNEQKQLFVEQHKHYLDEIIEQISEFSKRVILADANLDKVLSAYNKHRDKPIREQAENIIHLFTLTNLGAPAAFKYFDTTIDRKRYTSTKEVLDATLIHQSITGLYETRIDLSQLGGDGGEAAAKGGGGSEAAAKGGVLNLEEEYRLHEKPVPSSIDPSWLQLFPTVWAERAGMGLANQVPPVVVELRSGASPVAVRQYPMSKEAREGIRPHIQRFLDLGVLVPCQSPWNTPLLPVKKPGTNDYRPVQDLREINKRVQDIHPTVPNPYNLLSSLPPSHTWYSVLDLKDAFFCLKLHPNSQPLFAFEWRDPEKGNTGQLTWTRLPQGFKNSPTLFNEALHRDLAPFRALNPQVVLLQYVDDLLVAAPTYRDCKEGTQKLLQELSKLGYRVSAKKAQLCQKEVTYLGYLLKEGKRWLTPARKATVMKIPPPTTPRQVREFLGTAGFCRLWIPGFASLAAPLYPLTKPSIPFIWTEEHQKAFDRIKEALLSAPALALPDLTKPFTLYVDERAGVARGVLTQTLGPWRRPVAYLSKKLDPVASGWPTCLKAVAAVALLLKDADKLTLGQNVTVIASHSLESIVRQPPDRWMTNARMTHYQSLLLNERVSFAPPAVLNPATLLPVESEATPVHRCSEILAEETGTRRDLKDQPLPGVPAWYTDGSSFIAEGKRRAGAAIVDGKRTVWASSLPEGTSAQKAELVALTQALRLAEGKDINIYTDSRYAFATAHIHGAIYKQRGWLTSAGKDIKNKEEILALLEAIHLPKRVAIIHCPGHQKGNDPVATGNRRADEAAKQAALSTRVLAETTKPAGKRTADGSEFEKRTADGSEFESPKKKAKVE

SEQ ID NO: 7688 - protein, 2100 aa, synthetic construct
MPAAKRVKLDGGDKKYSIGLDIGTNSVGWAVITDEYKVPSKKFKVLGNTDRHSIKKNLIGALLFDSGETAEATRLKRTARRRYTRRKNRICYLQEIFSNEMAKVDDSFFHRLEESFLVEEDKKHERHPIFGNIVDEVAYHEKYPTIYHLRKKLVDSTDKADLRLIYLALAHMIKFRGHFLIEGDLNPDNSDVDKLFIQLVQTYNQLFEENPINASGVDAKAILSARLSKSRRLENLIAQLPGEKKNGLFGNLIALSLGLTPNFKSNFDLAEDAKLQLSKDTYDDDLDNLLAQIGDQYADLFLAAKNLSDAILLSDILRVNTEITKAPLSASMIKRYDEHHQDLTLLKALVRQQLPEKYKEIFFDQSKNGYAGYIDGGASQEEFYKFIKPILEKMDGTEELLVKLNREDLLRKQRTFDNGSIPHQIHLGELHAILRRQEDFYPFLKDNREKIEKILTFRIPYYVGPLARGNSRFAWMTRKSEETITPWNFEEVVDKGASAQSFIERMTNFDKNLPNEKVLPKHSLLYEYFTVYNELTKVKYVTEGMRKPAFLSGEQKKAIVDLLFKTNRKVTVKQLKEDYFKKIECFDSVEISGVEDRFNASLGTYHDLLKIIKDKDFLDNEENEDILEDIVLTLTLFEDREMIEERLKTYAHLFDDKVMKQLKRRRYTGWGRLSRKLINGIRDKQSGKTILDFLKSDGFANRNFMQLIHDDSLTFKEDIQKAQVSGQGDSLHEHIANLAGSPAIKKGILQTVKVVDELVKVMGRHKPENIVIEMARENQTTQKGQKNSRERMKRIEEGIKELGSQILKEHPVENTQLQNEKLYLYYLQNGRDMYVDQELDINRLSDYDVDHIVPQSFLKDDSIDNKVLTRSDKARGKSDNVPSEEVVKKMKNYWRQLLNAKLITQRKFDNLTKAERGGLSELDKAGFIKRQLVETRQITKHVAQILDSRMNTKYDENDKLIREVKVITLKSKLVSDFRKDFQFYKVREINNYHHAHDAYLNAVVGTALIKKYPKLESEFVYGDYKVYDVRKMIAKSEQEIGKATAKYFFYSNIMNFFKTEITLANGEIRKRPLIETNGETGEIVWDKGRDFATVRKVLSMPQVNIVKKTEVQTGGFSKESILPKRNSDKLIARKKDWDPKKYGGFDSPTVAYSVLVVAKVEKGKSKKLKSVKELLGITIMERSSFEKNPIDFLEAKGYKEVKKDLIIKLPKYSLFELENGRKRMLASAGELQKGNELALPSKYVNFLYLASHYEKLKGSPEDNEQKQLFVEQHKHYLDEIIEQISEFSKRVILADANLDKVLSAYNKHRDKPIREQAENIIHLFTLTNLGAPAAFKYFDTTIDRKRYTSTKEVLDATLIHQSITGLYETRIDLSQLGGDGGEAAAKGGGGSEAAAKGGTLNIEDEYRLHETSKEPDVPLGSTWLSDFPQAWAETGGMGLAVRQAPLIIPLKATSTPVSIKQYPMSQEARLGIKPHIQRLLDQGILVPCQSPWNTPLLPVKKPGTNDYRPVQDLREVNKRVEDIHPTVPNPYNLLSGLPPSHQWYTVLDLKDAFFCLRLHPTSQPLFAFEWRDPEMGISGQLTWTRLPQGFKNSPTLFDEALHRDLADFRIQHPDLILLQYVDDLLLAATSEQDCQRGTRALLQTLGNLGYRASAKKAQICQKQVKYLGYLLKEGQRWLTEARKETVMGQPTPKTPRQLREFLGTAGFCRLWIPGFAEMAAPLYPLTKTGTLFNWGPDQQKAYQEIKQALLTAPALGLPDLTKPFELFVDEKQGYAKGVLTQKLGPWRRPVAYLSKKLDPVAAGWPPCLRMVAAIAVLTKDAGKLTMGQPLVILAPHAVEALVKQPPDRWLSNARMTHYQAMLLDTDRVQFGPVVALNPATLLPLPEKEAPHDCLEILAETHGTRPDLTDQPIPDADYTWYTDGSSFLQEGQRRAGAAVTTETEVIWARALPAGTSAQRAELIALTQALKMAEGKKLNVYTDSRYAFATAHVHGEIYRRRGLLTSEGREIKNKNEILALLKALFLPKRLSIIHCPGHQKGNSAEARGNRMADQAAREAAMKAVLETSTLLAGKRTADGSEFEKRTADGSEFESPKKKAKVE

SEQ ID NO: 7689 - protein, 2103 aa, synthetic construct
MPAAKRVKLDGGDKKYSIGLDIGTNSVGWAVITDEYKVPSKKFKVLGNTDRHSIKKNLIGALLFDSGETAEATRLKRTARRRYTRRKNRICYLQEIFSNEMAKVDDSFFHRLEESFLVEEDKKHERHPIFGNIVDEVAYHEKYPTIYHLRKKLVDSTDKADLRLIYLALAHMIKFRGHFLIEGDLNPDNSDVDKLFIQLVQTYNQLFEENPINASGVDAKAILSARLSKSRRLENLIAQLPGEKKNGLFGNLIALSLGLTPNFKSNFDLAEDAKLQLSKDTYDDDLDNLLAQIGDQYADLFLAAKNLSDAILLSDILRVNTEITKAPLSASMIKRYDEHHQDLTLLKALVRQQLPEKYKEIFFDQSKNGYAGYIDGGASQEEFYKFIKPILEKMDGTEELLVKLNREDLLRKQRTFDNGSIPHQIHLGELHAILRRQEDFYPFLKDNREKIEKILTFRIPYYVGPLARGNSRFAWMTRKSEETITPWNFEEVVDKGASAQSFIERMTNFDKNLPNEKVLPKHSLLYEYFTVYNELTKVKYVTEGMRKPAFLSGEQKKAIVDLLFKTNRKVTVKQLKEDYFKKIECFDSVEISGVEDRFNASLGTYHDLLKIIKDKDFLDNEENEDILEDIVLTLTLFEDREMIEERLKTYAHLFDDKVMKQLKRRRYTGWGRLSRKLINGIRDKQSGKTILDFLKSDGFANRNFMQLIHDDSLTFKEDIQKAQVSGQGDSLHEHIANLAGSPAIKKGILQTVKVVDELVKVMGRHKPENIVIEMARENQTTQKGQKNSRERMKRIEEGIKELGSQILKEHPVENTQLQNEKLYLYYLQNGRDMYVDQELDINRLSDYDVDHIVPQSFLKDDSIDNKVLTRSDKARGKSDNVPSEEVVKKMKNYWRQLLNAKLITQRKFDNLTKAERGGLSELDKAGFIKRQLVETRQITKHVAQILDSRMNTKYDENDKLIREVKVITLKSKLVSDFRKDFQFYKVREINNYHHAHDAYLNAVVGTALIKKYPKLESEFVYGDYKVYDVRKMIAKSEQEIGKATAKYFFYSNIMNFFKTEITLANGEIRKRPLIETNGETGEIVWDKGRDFATVRKVLSMPQVNIVKKTEVQTGGFSKESILPKRNSDKLIARKKDWDPKKYGGFDSPTVAYSVLVVAKVEKGKSKKLKSVKELLGITIMERSSFEKNPIDFLEAKGYKEVKKDLIIKLPKYSLFELENGRKRMLASAGELQKGNELALPSKYVNFLYLASHYEKLKGSPEDNEQKQLFVEQHKHYLDEIIEQISEFSKRVILADANLDKVLSAYNKHRDKPIREQAENIIHLFTLTNLGAPAAFKYFDTTIDRKRYTSTKEVLDATLIHQSITGLYETRIDLSQLGGDGGSGSETPGTSESATPESGGTAPLEEEYRLFLEAPIQNVTLLEQWKREIPKVWAEINPPGLASTQAPIHVQLLSTALPVRVRQYPITLEAKRSLRETIRKFRAAGILRPVHSPWNTPLLPVRKSGTSEYRMVQDLREVNKRVETIHPTVPNPYTLLSLLPPDRIWYSVLDLKDAFFCIPLAPESQLIFAFEWADAEEGESGQLTWTRLPQGFKNSPTLFNEALNRDLQGFRLDHPSVSLLQYVDDLLIAADTQAACLSATRDLLMTLAELGYRVSGKKAQLCQEEVTYLGFKIHKGSRSLSNSRTQAILQIPVPKTKRQVREFLGTIGYCRLWIPGFAELAQPLYAATRPGNDPLVWGEKEEEAFQSLKLALTQPPALALPSLDKPFQLFVEETSGAAKGVLTQALGPWKRPVAYLSKRLDPVAAGWPRCLRAIAAAALLTREASKLTFGQDIEITSSHNLESLLRSPPDKWLTNARITQYQVLLLDPPRVRFKQTAALNPATLLPETDDTLPIHHCLDTLDSLTSTRPDLTDQPLAQAEATLFTDGSSYIRDGKRYAGAAVVTLDSVIWAEPLPIGTSAQKAELIALTKALEWSKDKSVNIYTDSRYAFATLHVHGMIYRERGWLTAGGKAIKNAPEILALLTAVWLPKRVAVMHCKGHQKDDAPTSTGNRRADEVAREVAIRPLSTQATISAGKRTADGSEFEKRTADGSEFESPKKKAKVE

SEQ ID NO: 7690 - protein, 2178 aa, synthetic construct
MPAAKRVKLDGGDKKYSIGLDIGTNSVGWAVITDEYKVPSKKFKVLGNTDRHSIKKNLIGALLFDSGETAEATRLKRTARRRYTRRKNRICYLQEIFSNEMAKVDDSFFHRLEESFLVEEDKKHERHPIFGNIVDEVAYHEKYPTIYHLRKKLVDSTDKADLRLIYLALAHMIKFRGHFLIEGDLNPDNSDVDKLFIQLVQTYNQLFEENPINASGVDAKAILSARLSKSRRLENLIAQLPGEKKNGLFGNLIALSLGLTPNFKSNFDLAEDAKLQLSKDTYDDDLDNLLAQIGDQYADLFLAAKNLSDAILLSDILRVNTEITKAPLSASMIKRYDEHHQDLTLLKALVRQQLPEKYKEIFFDQSKNGYAGYIDGGASQEEFYKFIKPILEKMDGTEELLVKLNREDLLRKQRTFDNGSIPHQIHLGELHAILRRQEDFYPFLKDNREKIEKILTFRIPYYVGPLARGNSRFAWMTRKSEETITPWNFEEVVDKGASAQSFIERMTNFDKNLPNEKVLPKHSLLYEYFTVYNELTKVKYVTEGMRKPAFLSGEQKKAIVDLLFKTNRKVTVKQLKEDYFKKIECFDSVEISGVEDRFNASLGTYHDLLKIIKDKDFLDNEENEDILEDIVLTLTLFEDREMIEERLKTYAHLFDDKVMKQLKRRRYTGWGRLSRKLINGIRDKQSGKTILDFLKSDGFANRNFMQLIHDDSLTFKEDIQKAQVSGQGDSLHEHIANLAGSPAIKKGILQTVKVVDELVKVMGRHKPENIVIEMARENQTTQKGQKNSRERMKRIEEGIKELGSQILKEHPVENTQLQNEKLYLYYLQNGRDMYVDQELDINRLSDYDVDHIVPQSFLKDDSIDNKVLTRSDKARGKSDNVPSEEVVKKMKNYWRQLLNAKLITQRKFDNLTKAERGGLSELDKAGFIKRQLVETRQITKHVAQILDSRMNTKYDENDKLIREVKVITLKSKLVSDFRKDFQFYKVREINNYHHAHDAYLNAVVGTALIKKYPKLESEFVYGDYKVYDVRKMIAKSEQEIGKATAKYFFYSNIMNFFKTEITLANGEIRKRPLIETNGETGEIVWDKGRDFATVRKVLSMPQVNIVKKTEVQTGGFSKESILPKRNSDKLIARKKDWDPKKYGGFDSPTVAYSVLVVAKVEKGKSKKLKSVKELLGITIMERSSFEKNPIDFLEAKGYKEVKKDLIIKLPKYSLFELENGRKRMLASAGELQKGNELALPSKYVNFLYLASHYEKLKGSPEDNEQKQLFVEQHKHYLDEIIEQISEFSKRVILADANLDKVLSAYNKHRDKPIREQAENIIHLFTLTNLGAPAAFKYFDTTIDRKRYTSTKEVLDATLIHQSITGLYETRIDLSQLGGDGGSGSETPGTSESATPESGGMDLLKPLTVERKGVKIKGYWNSQADITCVPKDLLQGEEPVRQQNVTTIHGTQEGDVYYVNLKIDGRRINTEVIGTTLDYAIITPGDVPWILKKPLELTIKLDLEEQQGTLLNNSILSKKGKEELKQLFEKYSALWQSWENQVGHRRIRPHKIATGTVKPTPQKQYHINPKAKPDIQIVINDLLKQGVLIQKESTMNTPVYPVPKPNGRWRMVLDYRAVNKVTPLIAVQNQHSYGILGSLFKGRYKTTIDLSNGFWAHPIVPEDYWITAFTWQGKQYCWTVLPQGFLNSPGLFTGDVVDLLQGIPNVEVYVDDVYISHDSEKEHLEYLDILFNRLKEAGYIISLKKSNIANSIVDFLGFQITNEGRGLTDTFKEKLENITAPTTLKQLQSILGLLNFARNFIPDFTELIAPLYALIPKSTKNYVPWQIEHSTTLETLITKLNGAEYLQGRKGDKTLIMKVNASYTTGYIRYYNEGEKKPISYVSIVFSKTELKFTELEKLLTTVHKGLLKALDLSMGQNIHVYSPIVSMQNIQKTPQTAKKALASRWLSWLSYLEDPRIRFFYDPQMPALKDLPAVDTGKDNKKHPSNFQHIFYTDGSAITSPTKEGHLNAGMGIVYFINKDGNLQKQQEWSISLGNHTAQFAEIAAFEFALKKCLPLGGNILVVTDSNYVAKAYNEELDVWASNGFVNNRKKPLKHISKWKSVADLKRLRPDVVVTHEPGHQKLDSSPHAYGNNLADQLATQASFKVHAGKRTADGSEFEKRTADGSEFESPKKKAKVE

SEQ ID NO: 7691 - protein, 2100 aa, synthetic construct
MPAAKRVKLDGGDKKYSIGLDIGTNSVGWAVITDEYKVPSKKFKVLGNTDRHSIKKNLIGALLFDSGETAEATRLKRTARRRYTRRKNRICYLQEIFSNEMAKVDDSFFHRLEESFLVEEDKKHERHPIFGNIVDEVAYHEKYPTIYHLRKKLVDSTDKADLRLIYLALAHMIKFRGHFLIEGDLNPDNSDVDKLFIQLVQTYNQLFEENPINASGVDAKAILSARLSKSRRLENLIAQLPGEKKNGLFGNLIALSLGLTPNFKSNFDLAEDAKLQLSKDTYDDDLDNLLAQIGDQYADLFLAAKNLSDAILLSDILRVNTEITKAPLSASMIKRYDEHHQDLTLLKALVRQQLPEKYKEIFFDQSKNGYAGYIDGGASQEEFYKFIKPILEKMDGTEELLVKLNREDLLRKQRTFDNGSIPHQIHLGELHAILRRQEDFYPFLKDNREKIEKILTFRIPYYVGPLARGNSRFAWMTRKSEETITPWNFEEVVDKGASAQSFIERMTNFDKNLPNEKVLPKHSLLYEYFTVYNELTKVKYVTEGMRKPAFLSGEQKKAIVDLLFKTNRKVTVKQLKEDYFKKIECFDSVEISGVEDRFNASLGTYHDLLKIIKDKDFLDNEENEDILEDIVLTLTLFEDREMIEERLKTYAHLFDDKVMKQLKRRRYTGWGRLSRKLINGIRDKQSGKTILDFLKSDGFANRNFMQLIHDDSLTFKEDIQKAQVSGQGDSLHEHIANLAGSPAIKKGILQTVKVVDELVKVMGRHKPENIVIEMARENQTTQKGQKNSRERMKRIEEGIKELGSQILKEHPVENTQLQNEKLYLYYLQNGRDMYVDQELDINRLSDYDVDHIVPQSFLKDDSIDNKVLTRSDKARGKSDNVPSEEVVKKMKNYWRQLLNAKLITQRKFDNLTKAERGGLSELDKAGFIKRQLVETRQITKHVAQILDSRMNTKYDENDKLIREVKVITLKSKLVSDFRKDFQFYKVREINNYHHAHDAYLNAVVGTALIKKYPKLESEFVYGDYKVYDVRKMIAKSEQEIGKATAKYFFYSNIMNFFKTEITLANGEIRKRPLIETNGETGEIVWDKGRDFATVRKVLSMPQVNIVKKTEVQTGGFSKESILPKRNSDKLIARKKDWDPKKYGGFDSPTVAYSVLVVAKVEKGKSKKLKSVKELLGITIMERSSFEKNPIDFLEAKGYKEVKKDLIIKLPKYSLFELENGRKRMLASAGELQKGNELALPSKYVNFLYLASHYEKLKGSPEDNEQKQLFVEQHKHYLDEIIEQISEFSKRVILADANLDKVLSAYNKHRDKPIREQAENIIHLFTLTNLGAPAAFKYFDTTIDRKRYTSTKEVLDATLIHQSITGLYETRIDLSQLGGDGGSGSETPGTSESATPESGGTLQLEEEYRLFEPESTQKQEMDIWLKNFPQAWAETGGMGTAHCQAPVLIQLKATATPISIRQYPMPHEAYQGIKPHIRRMLDQGILKPCQSPWNTPLLPVKKPGTEDYRPVQDLREVNKRVEDIHPTVPNPYNLLSTLPPSHPWYTVLDLKDAFFCLRLHSESQLLFAFEWRDPEIGLSGQLTWTRLPQGFKNSPTLFNEALHSDLADFRVRYPALVLLQYVDDLLLAAATRTECLEGTKALLETLGNKGYRASAKKAQICLQEVTYLGYSLKDGQRWLTKARKEAILSIPVPKNSRQVREFLGTAGYCRLWIPGFAELAAPLYPLTRPGTLFQWGTEQQLAFEDIKKALLSSPALGLPDITKPFELFIDENSGFAKGVLVQKLGPWKRPVAYLSKKLDTVASGWPPCLRMVAAIAILVKDAGKLTLGQPLTILTSHPVEALVRQPPNKWLSNARMTHYQAMLLDAERVHFGPTVSLNPATLLPLPSGGNHHDCLQILAETHGTRPDLTDQPLPDADLTWYTDGSSFIRNGEREAGAAVTTESEVIWAAPLPPGTSAQRAELIALTQALKMAEGKKLTVYTDSRYAFATTHVHGEIYRRRGWLTSEGKEIKNKNEILALLEALFLPKRLSIIHCPGHQKGDSPQAKGNRLADDTAKKAATETHSSLTVLPAGKRTADGSEFEKRTADGSEFESPKKKAKVE

SEQ ID NO: 7692 - protein, 2011 aa, synthetic construct
MPAAKRVKLDGGDKKYSIGLDIGTNSVGWAVITDEYKVPSKKFKVLGNTDRHSIKKNLIGALLFDSGETAEATRLKRTARRRYTRRKNRICYLQEIFSNEMAKVDDSFFHRLEESFLVEEDKKHERHPIFGNIVDEVAYHEKYPTIYHLRKKLVDSTDKADLRLIYLALAHMIKFRGHFLIEGDLNPDNSDVDKLFIQLVQTYNQLFEENPINASGVDAKAILSARLSKSRRLENLIAQLPGEKKNGLFGNLIALSLGLTPNFKSNFDLAEDAKLQLSKDTYDDDLDNLLAQIGDQYADLFLAAKNLSDAILLSDILRVNTEITKAPLSASMIKRYDEHHQDLTLLKALVRQQLPEKYKEIFFDQSKNGYAGYIDGGASQEEFYKFIKPILEKMDGTEELLVKLNREDLLRKQRTFDNGSIPHQIHLGELHAILRRQEDFYPFLKDNREKIEKILTFRIPYYVGPLARGNSRFAWMTRKSEETITPWNFEEVVDKGASAQSFIERMTNFDKNLPNEKVLPKHSLLYEYFTVYNELTKVKYVTEGMRKPAFLSGEQKKAIVDLLFKTNRKVTVKQLKEDYFKKIECFDSVEISGVEDRFNASLGTYHDLLKIIKDKDFLDNEENEDILEDIVLTLTLFEDREMIEERLKTYAHLFDDKVMKQLKRRRYTGWGRLSRKLINGIRDKQSGKTILDFLKSDGFANRNFMQLIHDDSLTFKEDIQKAQVSGQGDSLHEHIANLAGSPAIKKGILQTVKVVDELVKVMGRHKPENIVIEMARENQTTQKGQKNSRERMKRIEEGIKELGSQILKEHPVENTQLQNEKLYLYYLQNGRDMYVDQELDINRLSDYDVDHIVPQSFLKDDSIDNKVLTRSDKARGKSDNVPSEEVVKKMKNYWRQLLNAKLITQRKFDNLTKAERGGLSELDKAGFIKRQLVETRQITKHVAQILDSRMNTKYDENDKLIREVKVITLKSKLVSDFRKDFQFYKVREINNYHHAHDAYLNAVVGTALIKKYPKLESEFVYGDYKVYDVRKMIAKSEQEIGKATAKYFFYSNIMNFFKTEITLANGEIRKRPLIETNGETGEIVWDKGRDFATVRKVLSMPQVNIVKKTEVQTGGFSKESILPKRNSDKLIARKKDWDPKKYGGFDSPTVAYSVLVVAKVEKGKSKKLKSVKELLGITIMERSSFEKNPIDFLEAKGYKEVKKDLIIKLPKYSLFELENGRKRMLASAGELQKGNELALPSKYVNFLYLASHYEKLKGSPEDNEQKQLFVEQHKHYLDEIIEQISEFSKRVILADANLDKVLSAYNKHRDKPIREQAENIIHLFTLTNLGAPAAFKYFDTTIDRKRYTSTKEVLDATLIHQSITGLYETRIDLSQLGGDGGSGSETPGTSESATPESGGPLGTSDSPVTHADPIDWKSEEPVWVDQWPLTQEKLSAAQQLVQEQLRLGHIEPSTSAWNSPIFVIKKKSGKWRLLQDLRKVNETMMHMGALQPGLPTPSPIPDKSYIIVIDLKDCFYTIPLAPQDCKRFAFSLPSVNFKEPMQRYQWRVLPQGMTNSPTLCQKFVATAIAPVRQRFPQLYLVHYMDDILLAHTDEHLLYQAFSILKQHLSLNGLVIADEKIQTHFPYNYLGFSLYPRVYNTQLVKLQTDHLKTLNDFQKLLGDINWIRPYLKLPTYTLQPLFDILKGDSDPASPRTLSLEGRTALQSIEEAIRQQQITYCDYQRSWGLYILPTPRAPTGVLYQDKPLRWIYLSATPTKHLLPYYELVAKIIAKGRHEAIQYFGMEPPFICVPYALEQQDWLFQFSDNWSIAFANYPGQITHHYPSDKLLQFASSHAFIFPKIVRRQPIPEATLIFTDGSSNGTAALIINHQTYYAQTSFSSAQVVELFAVHQALLTVPTSFNLFTDSSYVVGALQMIETVPIIGTTSPEVLNLFTLIQQVLHCRQHPCFFGHIRAHSTLPGALVQGNHTADVLTKQVFFQSAGKRTADGSEFEKRTADGSEFESPKKKAKVE

SEQ ID NO: 7693 - protein, 2223 aa, synthetic construct
MPAAKRVKLDGGDKKYSIGLDIGTNSVGWAVITDEYKVPSKKFKVLGNTDRHSIKKNLIGALLFDSGETAEATRLKRTARRRYTRRKNRICYLQEIFSNEMAKVDDSFFHRLEESFLVEEDKKHERHPIFGNIVDEVAYHEKYPTIYHLRKKLVDSTDKADLRLIYLALAHMIKFRGHFLIEGDLNPDNSDVDKLFIQLVQTYNQLFEENPINASGVDAKAILSARLSKSRRLENLIAQLPGEKKNGLFGNLIALSLGLTPNFKSNFDLAEDAKLQLSKDTYDDDLDNLLAQIGDQYADLFLAAKNLSDAILLSDILRVNTEITKAPLSASMIKRYDEHHQDLTLLKALVRQQLPEKYKEIFFDQSKNGYAGYIDGGASQEEFYKFIKPILEKMDGTEELLVKLNREDLLRKQRTFDNGSIPHQIHLGELHAILRRQEDFYPFLKDNREKIEKILTFRIPYYVGPLARGNSRFAWMTRKSEETITPWNFEEVVDKGASAQSFIERMTNFDKNLPNEKVLPKHSLLYEYFTVYNELTKVKYVTEGMRKPAFLSGEQKKAIVDLLFKTNRKVTVKQLKEDYFKKIECFDSVEISGVEDRFNASLGTYHDLLKIIKDKDFLDNEENEDILEDIVLTLTLFEDREMIEERLKTYAHLFDDKVMKQLKRRRYTGWGRLSRKLINGIRDKQSGKTILDFLKSDGFANRNFMQLIHDDSLTFKEDIQKAQVSGQGDSLHEHIANLAGSPAIKKGILQTVKVVDELVKVMGRHKPENIVIEMARENQTTQKGQKNSRERMKRIEEGIKELGSQILKEHPVENTQLQNEKLYLYYLQNGRDMYVDQELDINRLSDYDVDHIVPQSFLKDDSIDNKVLTRSDKARGKSDNVPSEEVVKKMKNYWRQLLNAKLITQRKFDNLTKAERGGLSELDKAGFIKRQLVETRQITKHVAQILDSRMNTKYDENDKLIREVKVITLKSKLVSDFRKDFQFYKVREINNYHHAHDAYLNAVVGTALIKKYPKLESEFVYGDYKVYDVRKMIAKSEQEIGKATAKYFFYSNIMNFFKTEITLANGEIRKRPLIETNGETGEIVWDKGRDFATVRKVLSMPQVNIVKKTEVQTGGFSKESILPKRNSDKLIARKKDWDPKKYGGFDSPTVAYSVLVVAKVEKGKSKKLKSVKELLGITIMERSSFEKNPIDFLEAKGYKEVKKDLIIKLPKYSLFELENGRKRMLASAGELQKGNELALPSKYVNFLYLASHYEKLKGSPEDNEQKQLFVEQHKHYLDEIIEQISEFSKRVILADANLDKVLSAYNKHRDKPIREQAENIIHLFTLTNLGAPAAFKYFDTTIDRKRYTSTKEVLDATLIHQSITGLYETRIDLSQLGGDGGSGSETPGTSESATPESGGTLGDQGSRGSDPLPEPRVTLTVEGIPTEFLVNTGAEHSVLTKPMGKMGSKRTVVAGATGSKVYPWTTKRLLKIGQKQVTHSFLVIPECPAPLLGRDLLTKLKAQIQFSTEGPQVTWEDRPAMCLVLNLEEEYRLHEKPVPPSIDPSWLQLFPMVWAEKAGMGLANQVPPVVVELKSDASPVAVRQYPMSKEAREGIRPHIQRFLDLGILVPCQSPWNTPLLPVKKPGTNDYRPVQDLREVNKRVQDIHPTVPNPYNLLSSLPPSHTWYSVLDLKDAFFCLKLHPNSQPLFAFEWRDPEKGNTGQLTWTRLPQGFKNSPTLFDEALHRDLASFRALNPQVVMLQYVDDLLVAAPTYRDCKEGTRRLLQELSKLGYRVSAKKAQLCREEVTYLGYLLKGGKRWLTPARKATVMKIPTPTTPRQVREFLGTAGFCRLWIPGFASLAAPLYPLTREKVPFTWTEAHQEAFGRIKEALLSAPALALPDLTKPFALYVDEKEGVARGVLTQTLGPWRRPVAYLSKKLDPVASGWPTCLKAIAAVALLLKDADKLTLGQNVLVIAPHNLESIVRQPPDRWMTNARMTHYQSLLLNERVSFAPPAILNPATLLPVESDDTPIHICSEILAEETGTRPDLRDQPLPGVPAWYTDGSSFIMDGRRQAGAAIVDNKRTVWASNLPEGTSAQKAELIALTQALRLAEGKSINIYTDSRYAFATAHVHGAIYKQRGLLTSAGKDIKNKEEILALLEAIHLPKRVAIIHCPGHQRGTDPVATGNRKADEAAKQAAQSTRILTETTKNAGKRTADGSEFEKRTADGSEFESPKKKAKVE

SEQ ID NO: 7694 - protein, 2132 aa, synthetic construct
MPAAKRVKLDGGDKKYSIGLDIGTNSVGWAVITDEYKVPSKKFKVLGNTDRHSIKKNLIGALLFDSGETAEATRLKRTARRRYTRRKNRICYLQEIFSNEMAKVDDSFFHRLEESFLVEEDKKHERHPIFGNIVDEVAYHEKYPTIYHLRKKLVDSTDKADLRLIYLALAHMIKFRGHFLIEGDLNPDNSDVDKLFIQLVQTYNQLFEENPINASGVDAKAILSARLSKSRRLENLIAQLPGEKKNGLFGNLIALSLGLTPNFKSNFDLAEDAKLQLSKDTYDDDLDNLLAQIGDQYADLFLAAKNLSDAILLSDILRVNTEITKAPLSASMIKRYDEHHQDLTLLKALVRQQLPEKYKEIFFDQSKNGYAGYIDGGASQEEFYKFIKPILEKMDGTEELLVKLNREDLLRKQRTFDNGSIPHQIHLGELHAILRRQEDFYPFLKDNREKIEKILTFRIPYYVGPLARGNSRFAWMTRKSEETITPWNFEEVVDKGASAQSFIERMTNFDKNLPNEKVLPKHSLLYEYFTVYNELTKVKYVTEGMRKPAFLSGEQKKAIVDLLFKTNRKVTVKQLKEDYFKKIECFDSVEISGVEDRFNASLGTYHDLLKIIKDKDFLDNEENEDILEDIVLTLTLFEDREMIEERLKTYAHLFDDKVMKQLKRRRYTGWGRLSRKLINGIRDKQSGKTILDFLKSDGFANRNFMQLIHDDSLTFKEDIQKAQVSGQGDSLHEHIANLAGSPAIKKGILQTVKVVDELVKVMGRHKPENIVIEMARENQTTQKGQKNSRERMKRIEEGIKELGSQILKEHPVENTQLQNEKLYLYYLQNGRDMYVDQELDINRLSDYDVDHIVPQSFLKDDSIDNKVLTRSDKARGKSDNVPSEEVVKKMKNYWRQLLNAKLITQRKFDNLTKAERGGLSELDKAGFIKRQLVETRQITKHVAQILDSRMNTKYDENDKLIREVKVITLKSKLVSDFRKDFQFYKVREINNYHHAHDAYLNAVVGTALIKKYPKLESEFVYGDYKVYDVRKMIAKSEQEIGKATAKYFFYSNIMNFFKTEITLANGEIRKRPLIETNGETGEIVWDKGRDFATVRKVLSMPQVNIVKKTEVQTGGFSKESILPKRNSDKLIARKKDWDPKKYGGFDSPTVAYSVLVVAKVEKGKSKKLKSVKELLGITIMERSSFEKNPIDFLEAKGYKEVKKDLIIKLPKYSLFELENGRKRMLASAGELQKGNELALPSKYVNFLYLASHYEKLKGSPEDNEQKQLFVEQHKHYLDEIIEQISEFSKRVILADANLDKVLSAYNKHRDKPIREQAENIIHLFTLTNLGAPAAFKYFDTTIDRKRYTSTKEVLDATLIHQSITGLYETRIDLSQLGGDGGSGSETPGTSESATPESGGLLGRDLLTKLKAQIQFSTEGPQVTWEDRPAMCLVLNLEEEYRLHEKPVPPSIDPSWLQLFPMVWAEKAGMGLANQVPPVVVELKSDASPVAVRQYPMSKEAREGIRPHIQRFLDLGILVPCQSPWNTPLLPVKKPGTNDYRPVQDLREVNKRVQDIHPTVPNPYNLLSSLPPSHTWYSVLDLKDAFFCLKLHPNSQPLFAFEWRDPEKGNTGQLTWTRLPQGFKNSPTLFNEALHRDLASFRALNPQVVMLQYVDDLLVAAPTYRDCKEGTRRLLQELSKLGYRVSAKKAQLCREEVTYLGYLLKGGKRWLTPARKATVMKIPTPTTPRQVREFLGKAGFCRLFIPGFASLAAPLYPLTRPKVPFTWTEAHQEAFGRIKEALLSAPALALPDLTKPFALYVDEKEGVARGVLTQTLGPWRRPVAYLSKKLDPVASGWPTCLKAIAAVALLLKDADKLTLGQNVLVIAPHNLESIVRQPPDRWMTNARMTHYQSLLLNERVSFAPPAILNPATLLPVESDDTPIHICSEILAEETGTRPDLRDQPLPGVPAWYTDGSSFIMDGRRQAGAAIVDNKRTVWASNLPEGTSAQKAELIALTQALRLAEGKSINIYTDSRYAFATAHVHGAIYKQRGWLTSAGKDIKNKEEILALLEAIHLPKRVAIIHCPGHQRGTDPVATGNRKADEAAKQAAQSTRILTETTKNAGKRTADGSEFEKRTADGSEFESPKKKAKVE

SEQ ID NO: 7695 - protein, 2223 aa, synthetic construct
MPAAKRVKLDGGDKKYSIGLDIGTNSVGWAVITDEYKVPSKKFKVLGNTDRHSIKKNLIGALLFDSGETAEATRLKRTARRRYTRRKNRICYLQEIFSNEMAKVDDSFFHRLEESFLVEEDKKHERHPIFGNIVDEVAYHEKYPTIYHLRKKLVDSTDKADLRLIYLALAHMIKFRGHFLIEGDLNPDNSDVDKLFIQLVQTYNQLFEENPINASGVDAKAILSARLSKSRRLENLIAQLPGEKKNGLFGNLIALSLGLTPNFKSNFDLAEDAKLQLSKDTYDDDLDNLLAQIGDQYADLFLAAKNLSDAILLSDILRVNTEITKAPLSASMIKRYDEHHQDLTLLKALVRQQLPEKYKEIFFDQSKNGYAGYIDGGASQEEFYKFIKPILEKMDGTEELLVKLNREDLLRKQRTFDNGSIPHQIHLGELHAILRRQEDFYPFLKDNREKIEKILTFRIPYYVGPLARGNSRFAWMTRKSEETITPWNFEEVVDKGASAQSFIERMTNFDKNLPNEKVLPKHSLLYEYFTVYNELTKVKYVTEGMRKPAFLSGEQKKAIVDLLFKTNRKVTVKQLKEDYFKKIECFDSVEISGVEDRFNASLGTYHDLLKIIKDKDFLDNEENEDILEDIVLTLTLFEDREMIEERLKTYAHLFDDKVMKQLKRRRYTGWGRLSRKLINGIRDKQSGKTILDFLKSDGFANRNFMQLIHDDSLTFKEDIQKAQVSGQGDSLHEHIANLAGSPAIKKGILQTVKVVDELVKVMGRHKPENIVIEMARENQTTQKGQKNSRERMKRIEEGIKELGSQILKEHPVENTQLQNEKLYLYYLQNGRDMYVDQELDINRLSDYDVDHIVPQSFLKDDSIDNKVLTRSDKARGKSDNVPSEEVVKKMKNYWRQLLNAKLITQRKFDNLTKAERGGLSELDKAGFIKRQLVETRQITKHVAQILDSRMNTKYDENDKLIREVKVITLKSKLVSDFRKDFQFYKVREINNYHHAHDAYLNAVVGTALIKKYPKLESEFVYGDYKVYDVRKMIAKSEQEIGKATAKYFFYSNIMNFFKTEITLANGEIRKRPLIETNGETGEIVWDKGRDFATVRKVLSMPQVNIVKKTEVQTGGFSKESILPKRNSDKLIARKKDWDPKKYGGFDSPTVAYSVLVVAKVEKGKSKKLKSVKELLGITIMERSSFEKNPIDFLEAKGYKEVKKDLIIKLPKYSLFELENGRKRMLASAGELQKGNELALPSKYVNFLYLASHYEKLKGSPEDNEQKQLFVEQHKHYLDEIIEQISEFSKRVILADANLDKVLSAYNKHRDKPIREQAENIIHLFTLTNLGAPAAFKYFDTTIDRKRYTSTKEVLDATLIHQSITGLYETRIDLSQLGGDGGSGSETPGTSESATPESGGTLGDQGSRGSDPLPEPRVTLTVEGIPTEFLVNTGAEHSVLTKPMGKMGSKRTVVAGATGSKVYPWTTKRLLKIGQKQVTHSFLVIPECPAPLLGRDLLTKLKAQIQFSTEGPQVTWEDRPAMCLVLNLEEEYRLHEKPVPPSIDPSWLQLFPMVWAEKAGMGLANQVPPVVVELKSDASPVAVRQYPMSKEAREGIRPHIQRFLDLGILVPCQSPWNTPLLPVKKPGTNDYRPVQDLREVNKRVQDIHPTVPNPYNLLSSLPPSHTWYSVLDLKDAFFCLKLHPNSQPLFAFEWRDPEKGNTGQLTWTRLPQGFKNSPTLFNEALHRDLASFRALNPQVVMLQYVDDLLVAAPTYRDCKEGTRRLLQELSKLGYRVSAKKAQLCREEVTYLGYLLKGGKRWLTPARKATVMKIPTPTTPRQVREFLGTAGFCRLWIPGFASLAAPLYPLTRPKVPFTWTEAHQEAFGRIKEALLSAPALALPDLTKPFALYVDEKEGVARGVLTQTLGPWRRPVAYLSKKLDPVASGWPTCLKAIAAVALLLKDADKLTLGQNVLVIAPHNLESIVRQPPDRWMTNARMTHYQSLLLNERVSFAPPAILNPATLLPVESDDTPIHICSEILAEETGTRPDLRDQPLPGVPAWYTDGSSFIMDGRRQAGAAIVDNKRTVWASNLPEGTSAQKAELIALTQALRLAEGKSINIYTDSRYAFATAHVHGAIYKQRGWLTSAGKDIKNKEEILALLEAIHLPKRVAIIHCPGHQRGTDPVATGNRKADEAAKQAAQSTRILTETTKNAGKRTADGSEFEKRTADGSEFESPKKKAKVE

SEQ ID NO: 7696 - protein, 2101 aa, synthetic construct
MPAAKRVKLDGGDKKYSIGLDIGTNSVGWAVITDEYKVPSKKFKVLGNTDRHSIKKNLIGALLFDSGETAEATRLKRTARRRYTRRKNRICYLQEIFSNEMAKVDDSFFHRLEESFLVEEDKKHERHPIFGNIVDEVAYHEKYPTIYHLRKKLVDSTDKADLRLIYLALAHMIKFRGHFLIEGDLNPDNSDVDKLFIQLVQTYNQLFEENPINASGVDAKAILSARLSKSRRLENLIAQLPGEKKNGLFGNLIALSLGLTPNFKSNFDLAEDAKLQLSKDTYDDDLDNLLAQIGDQYADLFLAAKNLSDAILLSDILRVNTEITKAPLSASMIKRYDEHHQDLTLLKALVRQQLPEKYKEIFFDQSKNGYAGYIDGGASQEEFYKFIKPILEKMDGTEELLVKLNREDLLRKQRTFDNGSIPHQIHLGELHAILRRQEDFYPFLKDNREKIEKILTFRIPYYVGPLARGNSRFAWMTRKSEETITPWNFEEVVDKGASAQSFIERMTNFDKNLPNEKVLPKHSLLYEYFTVYNELTKVKYVTEGMRKPAFLSGEQKKAIVDLLFKTNRKVTVKQLKEDYFKKIECFDSVEISGVEDRFNASLGTYHDLLKIIKDKDFLDNEENEDILEDIVLTLTLFEDREMIEERLKTYAHLFDDKVMKQLKRRRYTGWGRLSRKLINGIRDKQSGKTILDFLKSDGFANRNFMQLIHDDSLTFKEDIQKAQVSGQGDSLHEHIANLAGSPAIKKGILQTVKVVDELVKVMGRHKPENIVIEMARENQTTQKGQKNSRERMKRIEEGIKELGSQILKEHPVENTQLQNEKLYLYYLQNGRDMYVDQELDINRLSDYDVDHIVPQSFLKDDSIDNKVLTRSDKARGKSDNVPSEEVVKKMKNYWRQLLNAKLITQRKFDNLTKAERGGLSELDKAGFIKRQLVETRQITKHVAQILDSRMNTKYDENDKLIREVKVITLKSKLVSDFRKDFQFYKVREINNYHHAHDAYLNAVVGTALIKKYPKLESEFVYGDYKVYDVRKMIAKSEQEIGKATAKYFFYSNIMNFFKTEITLANGEIRKRPLIETNGETGEIVWDKGRDFATVRKVLSMPQVNIVKKTEVQTGGFSKESILPKRNSDKLIARKKDWDPKKYGGFDSPTVAYSVLVVAKVEKGKSKKLKSVKELLGITIMERSSFEKNPIDFLEAKGYKEVKKDLIIKLPKYSLFELENGRKRMLASAGELQKGNELALPSKYVNFLYLASHYEKLKGSPEDNEQKQLFVEQHKHYLDEIIEQISEFSKRVILADANLDKVLSAYNKHRDKPIREQAENIIHLFTLTNLGAPAAFKYFDTTIDRKRYTSTKEVLDATLIHQSITGLYETRIDLSQLGGDGGSGSETPGTSESATPESGGTLNLEDEYRLYETSAEPEVSPGSTWLSDFPQAWAETGGMGLAVRQAPLIIPLKATSTPVSIKQYPMSQEAKLGIKPHIQRLLDQGILVPCQSPWNTPLLPVKKPGTNDYRPVQDLREVNKRVEDIHPTVPNPYNLLSGLPPSHRWYTVLDLKDAFFCLRLHPTSQPLFAFEWRDPGMGISGQLTWTRLPQGFKNSPTLFNEALHRDLADFRIQHPDLILLQYVDDILLAATSELDCQQGTRALLLTLGNLGYRASAKKAQLCQKQVKYLGYLLKEGQRWLTEARKETVMGQPTPKTPRQLREFLGTAGFCRLWIPGFAEMAAPLYPLTKPGTLFNWGPDQQKAYQEIKQALLTAPALGLPDLTKPFELFVDEKQGYAKGVLTQKLGPWRRPVAYLSKKLDPVAAGWPPCLRMVAAIAVLRKDAGKLTMGQPLVILAPHAVEALVKQPPDRWLSNARMTHYQAMLLDTDRVQFGPVVALNPATLLPLPEEGAPHDCLEILAETHGTRPDLTDQPIPDADHTWYTDGSSFLQEGQRKAGAAVTTETEVIWARALPAGTSAQRAELIALTQALKMAEGKRLNVYTDSRYAFATAHIHGEIYRRRGWLTSEGREIKNKSEILALLKALFLPKRLSIIHCLGHQKGDSAEARGNRLADQAAREAAIKTPPDTSTLLAGKRTADGSEFEKRTADGSEFESPKKKAKVE

SEQ ID NO: 7697 - protein, 2101 aa, synthetic construct
MPAAKRVKLDGGDKKYSIGLDIGTNSVGWAVITDEYKVPSKKFKVLGNTDRHSIKKNLIGALLFDSGETAEATRLKRTARRRYTRRKNRICYLQEIFSNEMAKVDDSFFHRLEESFLVEEDKKHERHPIFGNIVDEVAYHEKYPTIYHLRKKLVDSTDKADLRLIYLALAHMIKFRGHFLIEGDLNPDNSDVDKLFIQLVQTYNQLFEENPINASGVDAKAILSARLSKSRRLENLIAQLPGEKKNGLFGNLIALSLGLTPNFKSNFDLAEDAKLQLSKDTYDDDLDNLLAQIGDQYADLFLAAKNLSDAILLSDILRVNTEITKAPLSASMIKRYDEHHQDLTLLKALVRQQLPEKYKEIFFDQSKNGYAGYIDGGASQEEFYKFIKPILEKMDGTEELLVKLNREDLLRKQRTFDNGSIPHQIHLGELHAILRRQEDFYPFLKDNREKIEKILTFRIPYYVGPLARGNSRFAWMTRKSEETITPWNFEEVVDKGASAQSFIERMTNFDKNLPNEKVLPKHSLLYEYFTVYNELTKVKYVTEGMRKPAFLSGEQKKAIVDLLFKTNRKVTVKQLKEDYFKKIECFDSVEISGVEDRFNASLGTYHDLLKIIKDKDFLDNEENEDILEDIVLTLTLFEDREMIEERLKTYAHLFDDKVMKQLKRRRYTGWGRLSRKLINGIRDKQSGKTILDFLKSDGFANRNFMQLIHDDSLTFKEDIQKAQVSGQGDSLHEHIANLAGSPAIKKGILQTVKVVDELVKVMGRHKPENIVIEMARENQTTQKGQKNSRERMKRIEEGIKELGSQILKEHPVENTQLQNEKLYLYYLQNGRDMYVDQELDINRLSDYDVDHIVPQSFLKDDSIDNKVLTRSDKARGKSDNVPSEEVVKKMKNYWRQLLNAKLITQRKFDNLTKAERGGLSELDKAGFIKRQLVETRQITKHVAQILDSRMNTKYDENDKLIREVKVITLKSKLVSDFRKDFQFYKVREINNYHHAHDAYLNAVVGTALIKKYPKLESEFVYGDYKVYDVRKMIAKSEQEIGKATAKYFFYSNIMNFFKTEITLANGEIRKRPLIETNGETGEIVWDKGRDFATVRKVLSMPQVNIVKKTEVQTGGFSKESILPKRNSDKLIARKKDWDPKKYGGFDSPTVAYSVLVVAKVEKGKSKKLKSVKELLGITIMERSSFEKNPIDFLEAKGYKEVKKDLIIKLPKYSLFELENGRKRMLASAGELQKGNELALPSKYVNFLYLASHYEKLKGSPEDNEQKQLFVEQHKHYLDEIIEQISEFSKRVILADANLDKVLSAYNKHRDKPIREQAENIIHLFTLTNLGAPAAFKYFDTTIDRKRYTSTKEVLDATLIHQSITGLYETRIDLSQLGGDGGSGSETPGTSESATPESGGTLNLEDEYRLYETSAEPEVSPGSTWLSDFPQAWAETGGMGLAVRQAPLIIPLKATSTPVSIKQYPMSQEAKLGIKPHIQRLLDQGILVPCQSPWNTPLLPVKKPGTNDYRPVQDLREVNKRVEDIHPTVPNPYNLLSGLPPSHRWYTVLDLKDAFFCLRLHPTSQPLFAFEWRDPGMGISGQLTWTRLPQGFKNSPTLFNEALHRDLADFRIQHPDLILLQYVDDILLAATSELDCQQGTRALLLTLGNLGYRASAKKAQLCQKQVKYLGYLLKEGQRWLTEARKETVMGQPTPKTPRQLREFLGKAGFCRLFIPGFAEMAAPLYPLTKPGTLFNWGPDQQKAYQEIKQALLTAPALGLPDLTKPFELFVDEKQGYAKGVLTQKLGPWRRPVAYLSKKLDPVAAGWPPCLRMVAAIAVLRKDAGKLTMGQPLVILAPHAVEALVKQPPDRWLSNARMTHYQAMLLDTDRVQFGPVVALNPATLLPLPEEGAPHDCLEILAETHGTRPDLTDQPIPDADHTWYTDGSSFLQEGQRKAGAAVTTETEVIWARALPAGTSAQRAELIALTQALKMAEGKRLNVYTDSRYAFATAHIHGEIYRRRGWLTSEGREIKNKSEILALLKALFLPKRLSIIHCLGHQKGDSAEARGNRLADQAAREAAIKTPPDTSTLLAGKRTADGSEFEKRTADGSEFESPKKKAKVE

SEQ ID NO: 7698 - protein, 2101 aa, synthetic construct
MPAAKRVKLDGGDKKYSIGLDIGTNSVGWAVITDEYKVPSKKFKVLGNTDRHSIKKNLIGALLFDSGETAEATRLKRTARRRYTRRKNRICYLQEIFSNEMAKVDDSFFHRLEESFLVEEDKKHERHPIFGNIVDEVAYHEKYPTIYHLRKKLVDSTDKADLRLIYLALAHMIKFRGHFLIEGDLNPDNSDVDKLFIQLVQTYNQLFEENPINASGVDAKAILSARLSKSRRLENLIAQLPGEKKNGLFGNLIALSLGLTPNFKSNFDLAEDAKLQLSKDTYDDDLDNLLAQIGDQYADLFLAAKNLSDAILLSDILRVNTEITKAPLSASMIKRYDEHHQDLTLLKALVRQQLPEKYKEIFFDQSKNGYAGYIDGGASQEEFYKFIKPILEKMDGTEELLVKLNREDLLRKQRTFDNGSIPHQIHLGELHAILRRQEDFYPFLKDNREKIEKILTFRIPYYVGPLARGNSRFAWMTRKSEETITPWNFEEVVDKGASAQSFIERMTNFDKNLPNEKVLPKHSLLYEYFTVYNELTKVKYVTEGMRKPAFLSGEQKKAIVDLLFKTNRKVTVKQLKEDYFKKIECFDSVEISGVEDRFNASLGTYHDLLKIIKDKDFLDNEENEDILEDIVLTLTLFEDREMIEERLKTYAHLFDDKVMKQLKRRRYTGWGRLSRKLINGIRDKQSGKTILDFLKSDGFANRNFMQLIHDDSLTFKEDIQKAQVSGQGDSLHEHIANLAGSPAIKKGILQTVKVVDELVKVMGRHKPENIVIEMARENQTTQKGQKNSRERMKRIEEGIKELGSQILKEHPVENTQLQNEKLYLYYLQNGRDMYVDQELDINRLSDYDVDHIVPQSFLKDDSIDNKVLTRSDKARGKSDNVPSEEVVKKMKNYWRQLLNAKLITQRKFDNLTKAERGGLSELDKAGFIKRQLVETRQITKHVAQILDSRMNTKYDENDKLIREVKVITLKSKLVSDFRKDFQFYKVREINNYHHAHDAYLNAVVGTALIKKYPKLESEFVYGDYKVYDVRKMIAKSEQEIGKATAKYFFYSNIMNFFKTEITLANGEIRKRPLIETNGETGEIVWDKGRDFATVRKVLSMPQVNIVKKTEVQTGGFSKESILPKRNSDKLIARKKDWDPKKYGGFDSPTVAYSVLVVAKVEKGKSKKLKSVKELLGITIMERSSFEKNPIDFLEAKGYKEVKKDLIIKLPKYSLFELENGRKRMLASAGELQKGNELALPSKYVNFLYLASHYEKLKGSPEDNEQKQLFVEQHKHYLDEIIEQISEFSKRVILADANLDKVLSAYNKHRDKPIREQAENIIHLFTLTNLGAPAAFKYFDTTIDRKRYTSTKEVLDATLIHQSITGLYETRIDLSQLGGDGGSGSETPGTSESATPESGGTLGIEDEYRLHETSTEPDVSLGSTWLSDFPQAWAETGGMGLAVRQAPLIIPLKATSTPVSIQQYPMSHEARLGIKPHIQRLLDQGILVPCQSPWNTPLLPVKKPGTNDYRPVQDLREVNKRVEDIHPTVPNPYNLLSGLPPSHQWYTVLDLKDAFFCLRLHPTSQPLFAFEWRDPGMGISGQLTWTRLPQGFKNSPTLFNEALHRDLADFRIQHPDLILLQYVDDILLAATSELDCQQGTRALLQTLGDLGYRASAKKAQICQKQVKYLGYLLREGQRWLTEARKETVMGQPVPKTPRQLREFLGTAGFCRLWIPGFAEMAAPLYPLTKPGTLFSWGPDQQKAYQEIKQALLTAPALGLPDLTKPFELFVDEKQGYAKGVLTQKLGPWRRPVAYLSKKLDPVAAGWPPCLRMVAAIAVLTKDAGKLTMGQPLVILAPHAVEALVKQPPDRWLSNARMTHYQAMLLDTDRVQFGPVVALNPATLLPLPEEGAPHDCLEILAETHGTRPDLTDQPIPDADHTWYTDGSSFLQEGQRKAGAAVTTETEVIWAGALPAGTSAQRAELIALTQALKMAEGKRLNVYTDSRYAFATAHIHGEIYRRRGWLTSEGREIKNKSEILALLKALFLPKRLSIIHCLGHQKGDSAEARGNRLADQAAREAAIKTPPDTSTLLAGKRTADGSEFEKRTADGSEFESPKKKAKVE

SEQ ID NO: 7699 - protein, 2101 aa, synthetic construct
MPAAKRVKLDGGDKKYSIGLDIGTNSVGWAVITDEYKVPSKKFKVLGNTDRHSIKKNLIGALLFDSGETAEATRLKRTARRRYTRRKNRICYLQEIFSNEMAKVDDSFFHRLEESFLVEEDKKHERHPIFGNIVDEVAYHEKYPTIYHLRKKLVDSTDKADLRLIYLALAHMIKFRGHFLIEGDLNPDNSDVDKLFIQLVQTYNQLFEENPINASGVDAKAILSARLSKSRRLENLIAQLPGEKKNGLFGNLIALSLGLTPNFKSNFDLAEDAKLQLSKDTYDDDLDNLLAQIGDQYADLFLAAKNLSDAILLSDILRVNTEITKAPLSASMIKRYDEHHQDLTLLKALVRQQLPEKYKEIFFDQSKNGYAGYIDGGASQEEFYKFIKPILEKMDGTEELLVKLNREDLLRKQRTFDNGSIPHQIHLGELHAILRRQEDFYPFLKDNREKIEKILTFRIPYYVGPLARGNSRFAWMTRKSEETITPWNFEEVVDKGASAQSFIERMTNFDKNLPNEKVLPKHSLLYEYFTVYNELTKVKYVTEGMRKPAFLSGEQKKAIVDLLFKTNRKVTVKQLKEDYFKKIECFDSVEISGVEDRFNASLGTYHDLLKIIKDKDFLDNEENEDILEDIVLTLTLFEDREMIEERLKTYAHLFDDKVMKQLKRRRYTGWGRLSRKLINGIRDKQSGKTILDFLKSDGFANRNFMQLIHDDSLTFKEDIQKAQVSGQGDSLHEHIANLAGSPAIKKGILQTVKVVDELVKVMGRHKPENIVIEMARENQTTQKGQKNSRERMKRIEEGIKELGSQILKEHPVENTQLQNEKLYLYYLQNGRDMYVDQELDINRLSDYDVDHIVPQSFLKDDSIDNKVLTRSDKARGKSDNVPSEEVVKKMKNYWRQLLNAKLITQRKFDNLTKAERGGLSELDKAGFIKRQLVETRQITKHVAQILDSRMNTKYDENDKLIREVKVITLKSKLVSDFRKDFQFYKVREINNYHHAHDAYLNAVVGTALIKKYPKLESEFVYGDYKVYDVRKMIAKSEQEIGKATAKYFFYSNIMNFFKTEITLANGEIRKRPLIETNGETGEIVWDKGRDFATVRKVLSMPQVNIVKKTEVQTGGFSKESILPKRNSDKLIARKKDWDPKKYGGFDSPTVAYSVLVVAKVEKGKSKKLKSVKELLGITIMERSSFEKNPIDFLEAKGYKEVKKDLIIKLPKYSLFELENGRKRMLASAGELQKGNELALPSKYVNFLYLASHYEKLKGSPEDNEQKQLFVEQHKHYLDEIIEQISEFSKRVILADANLDKVLSAYNKHRDKPIREQAENIIHLFTLTNLGAPAAFKYFDTTIDRKRYTSTKEVLDATLIHQSITGLYETRIDLSQLGGDGGSGSETPGTSESATPESGGTLNIEDEYRLHETSKEPDVSLGSTWLSDFPQAWAETGGMGLAVRQAPLIIPLKATSTPVSIKQYPMSQEARLGIKPHIQRLLDQGILVPCQSPWNTPLLPVKKPGTNDYRPVQDLREVNKRVEDIHPTVPNPYNLLSGLPPSHQWYTVLDLKDAFFCLRLHPTSQPLFAFEWRDPEMGISGQLTWTRLPQGFKNSPTLFNEALHRDLAGFRIQHPDLILLQYVDDLLLAATSELDCQQGTRALLQTLGDLGYRASAKKAQICQKQVKYLGYLLKEGQRWLTEARKETVMGQPIPKTPRQLREFLGTAGFCRLWIPGFAEMAAPLYPLTKPGTLFNWGPDQQKAFQEIKQALLTAPALGLPDLTKPFELFVDEKQGYAKGVLTQKLGPWRRPVAYLSKKLDPVAAGWPPCLRMVAAIAVLTKDAGKLTMGQPLVILAPHAVEALVKQPPDRWLSNARMTHYQALLLDTDRVQFGPVVALNPATLLPLPEEGLQHDCLDILAEAHGTRSDLMDQPLPDADHTWYTDGSSFLQEGQRKAGAAVTTETEVIWARALPAGTSAQRAELIALTQALKMAEGKKLNVYTDSRYAFATAHIHGEIYRRRGWLTSEGKEIKNKDEILALLKALFLPKRLSIIHCPGHQKGNSAEARGNRMADQAAREVATRETPETSTLLAGKRTADGSEFEKRTADGSEFESPKKKAKVE

SEQ ID NO: 7700 - protein, 2101 aa, synthetic construct
MPAAKRVKLDGGDKKYSIGLDIGTNSVGWAVITDEYKVPSKKFKVLGNTDRHSIKKNLIGALLFDSGETAEATRLKRTARRRYTRRKNRICYLQEIFSNEMAKVDDSFFHRLEESFLVEEDKKHERHPIFGNIVDEVAYHEKYPTIYHLRKKLVDSTDKADLRLIYLALAHMIKFRGHFLIEGDLNPDNSDVDKLFIQLVQTYNQLFEENPINASGVDAKAILSARLSKSRRLENLIAQLPGEKKNGLFGNLIALSLGLTPNFKSNFDLAEDAKLQLSKDTYDDDLDNLLAQIGDQYADLFLAAKNLSDAILLSDILRVNTEITKAPLSASMIKRYDEHHQDLTLLKALVRQQLPEKYKEIFFDQSKNGYAGYIDGGASQEEFYKFIKPILEKMDGTEELLVKLNREDLLRKQRTFDNGSIPHQIHLGELHAILRRQEDFYPFLKDNREKIEKILTFRIPYYVGPLARGNSRFAWMTRKSEETITPWNFEEVVDKGASAQSFIERMTNFDKNLPNEKVLPKHSLLYEYFTVYNELTKVKYVTEGMRKPAFLSGEQKKAIVDLLFKTNRKVTVKQLKEDYFKKIECFDSVEISGVEDRFNASLGTYHDLLKIIKDKDFLDNEENEDILEDIVLTLTLFEDREMIEERLKTYAHLFDDKVMKQLKRRRYTGWGRLSRKLINGIRDKQSGKTILDFLKSDGFANRNFMQLIHDDSLTFKEDIQKAQVSGQGDSLHEHIANLAGSPAIKKGILQTVKVVDELVKVMGRHKPENIVIEMARENQTTQKGQKNSRERMKRIEEGIKELGSQILKEHPVENTQLQNEKLYLYYLQNGRDMYVDQELDINRLSDYDVDHIVPQSFLKDDSIDNKVLTRSDKARGKSDNVPSEEVVKKMKNYWRQLLNAKLITQRKFDNLTKAERGGLSELDKAGFIKRQLVETRQITKHVAQILDSRMNTKYDENDKLIREVKVITLKSKLVSDFRKDFQFYKVREINNYHHAHDAYLNAVVGTALIKKYPKLESEFVYGDYKVYDVRKMIAKSEQEIGKATAKYFFYSNIMNFFKTEITLANGEIRKRPLIETNGETGEIVWDKGRDFATVRKVLSMPQVNIVKKTEVQTGGFSKESILPKRNSDKLIARKKDWDPKKYGGFDSPTVAYSVLVVAKVEKGKSKKLKSVKELLGITIMERSSFEKNPIDFLEAKGYKEVKKDLIIKLPKYSLFELENGRKRMLASAGELQKGNELALPSKYVNFLYLASHYEKLKGSPEDNEQKQLFVEQHKHYLDEIIEQISEFSKRVILADANLDKVLSAYNKHRDKPIREQAENIIHLFTLTNLGAPAAFKYFDTTIDRKRYTSTKEVLDATLIHQSITGLYETRIDLSQLGGDGGSGSETPGTSESATPESGGTLNIEDEYRLHETSKGPDVPLGSTWLSDFPQAWAETGGMGLAVRQAPLIIPLKATSTPVSIKQYPMSQEARLGIKPHIQRLLDQGILVPCQSPWNTPLLPVKKPGTNDYRPVQDLREVNKRVEDIHPTVPNPYNLLSGLPPSHQWYTVLDLKDAFFCLRLHPTSQSLFAFEWRDPEMGISGQLTWTRLPQGFKNSPTLFDEALHRDLADFRIQHPDLILLQYVDDLLLAATSELDCQQGTRALLQTLGDLGYRASAKKAQICQKQVKYLGYLLKEGQRWLTEARKETVMGQPTPKTPRQLREFLGTAGFCRLWIPGFAEMAAPLYPLTKTGTLFEWGPDQQKAYQEIKQALLTAPALGLPDLTKPFELFVDEKQGYAKGVLTQKLGPWRRPVAYLSKKLDPVAAGWPPCLRMVAAIAVLTKDAGKLTMGQPLVILAPHAVEALVKQPPDRWLSNARMTHYQALLLDTDRVQFGPIVALNPATLLPLPEEGLQHDCLDILAEAHGTRPDLTDQPLPDADHTWYTDGSSFLQEGQRKAGAAVTTETEVVWAKALPAGTSAQRAELIALTQALKMAEGKKLNVYTDSRYAFATAHIHGEIYRRRGLLTSEGKEIKNKDEILALLKALFLPKRLSIIHCPGHQKGNRAEARGNRMADQAAREVATRETPETSTLLAGKRTADGSEFEKRTADGSEFESPKKKAKVE

SEQ ID NO: 7701 - protein, 2095 aa, synthetic construct
MPAAKRVKLDGGDKKYSIGLDIGTNSVGWAVITDEYKVPSKKFKVLGNTDRHSIKKNLIGALLFDSGETAEATRLKRTARRRYTRRKNRICYLQEIFSNEMAKVDDSFFHRLEESFLVEEDKKHERHPIFGNIVDEVAYHEKYPTIYHLRKKLVDSTDKADLRLIYLALAHMIKFRGHFLIEGDLNPDNSDVDKLFIQLVQTYNQLFEENPINASGVDAKAILSARLSKSRRLENLIAQLPGEKKNGLFGNLIALSLGLTPNFKSNFDLAEDAKLQLSKDTYDDDLDNLLAQIGDQYADLFLAAKNLSDAILLSDILRVNTEITKAPLSASMIKRYDEHHQDLTLLKALVRQQLPEKYKEIFFDQSKNGYAGYIDGGASQEEFYKFIKPILEKMDGTEELLVKLNREDLLRKQRTFDNGSIPHQIHLGELHAILRRQEDFYPFLKDNREKIEKILTFRIPYYVGPLARGNSRFAWMTRKSEETITPWNFEEVVDKGASAQSFIERMTNFDKNLPNEKVLPKHSLLYEYFTVYNELTKVKYVTEGMRKPAFLSGEQKKAIVDLLFKTNRKVTVKQLKEDYFKKIECFDSVEISGVEDRFNASLGTYHDLLKIIKDKDFLDNEENEDILEDIVLTLTLFEDREMIEERLKTYAHLFDDKVMKQLKRRRYTGWGRLSRKLINGIRDKQSGKTILDFLKSDGFANRNFMQLIHDDSLTFKEDIQKAQVSGQGDSLHEHIANLAGSPAIKKGILQTVKVVDELVKVMGRHKPENIVIEMARENQTTQKGQKNSRERMKRIEEGIKELGSQILKEHPVENTQLQNEKLYLYYLQNGRDMYVDQELDINRLSDYDVDHIVPQSFLKDDSIDNKVLTRSDKARGKSDNVPSEEVVKKMKNYWRQLLNAKLITQRKFDNLTKAERGGLSELDKAGFIKRQLVETRQITKHVAQILDSRMNTKYDENDKLIREVKVITLKSKLVSDFRKDFQFYKVREINNYHHAHDAYLNAVVGTALIKKYPKLESEFVYGDYKVYDVRKMIAKSEQEIGKATAKYFFYSNIMNFFKTEITLANGEIRKRPLIETNGETGEIVWDKGRDFATVRKVLSMPQVNIVKKTEVQTGGFSKESILPKRNSDKLIARKKDWDPKKYGGFDSPTVAYSVLVVAKVEKGKSKKLKSVKELLGITIMERSSFEKNPIDFLEAKGYKEVKKDLIIKLPKYSLFELENGRKRMLASAGELQKGNELALPSKYVNFLYLASHYEKLKGSPEDNEQKQLFVEQHKHYLDEIIEQISEFSKRVILADANLDKVLSAYNKHRDKPIREQAENIIHLFTLTNLGAPAAFKYFDTTIDRKRYTSTKEVLDATLIHQSITGLYETRIDLSQLGGDGGSGSETPGTSESATPESGGTLQLDDEYRLYSPLVKPDQNIQFWLEQFPQAWAETAGMGLAKQVPPQVIQLKASATPVSVRQYPLSKEAQEGIRPHVQRLIQQGILVPVQSPWNTPLLPVRKPGTNDYRPVQDLREVNKRVQDIHPTVPNPYNLLCALPPQRSWYTVLDLKDAFFCLRLHPTSQPLFAFEWRDPGTGRTGQLTWTRLPQGFKNSPTIFDEALHRDLANFRIQHPQVTLLQYVDDLLLAGATKQDCLEGTKALLLELSDLGYRASAKKAQICRREVTYLGYSLRDGQRWLTEARKKTVVQIPAPTTAKQVREFLGTAGFCRLWIPGFATLAAPLYPLTKEKGEFSWAPEHQKAFDAIKKALLSAPALALPDVTKPFTLYVDERKGVARGVLTQTLGPWRRPVAYLSKKLDPVASGWPVCLKAIAAVAILVKDADKLTLGQNITVIAPHALENIVRQPPDRWMTNARMTHYQSLLLTERVTFAPPAALNPATLLPEETDEPVTHDCHQLLIEETGVRKDLTDIPLTGEVLTWFTDGSSYVVEGKRMAGAAVVDGTRTIWASSLPEGTSAQKAELMALTQALRLAEGKSINIYTDSRYAFATAHVHGAIYKQRGLLTSAGREIKNKEEILSLLEALHLPKRLAIIHCPGHQKAKDPISRGNQMADRVAKQAAQGVNLLAGKRTADGSEFEKRTADGSEFESPKKKAKVE

SEQ ID NO: 7702 - protein, 2095 aa, synthetic construct; identical to SEQ ID NO: 7701

SEQ ID NO: 7703 - protein, 2181 aa, synthetic construct
MPAAKRVKLDGGDKKYSIGLDIGTNSVGWAVITDEYKVPSKKFKVLGNTDRHSIKKNLIGALLFDSGETAEATRLKRTARRRYTRRKNRICYLQEIFSNEMAKVDDSFFHRLEESFLVEEDKKHERHPIFGNIVDEVAYHEKYPTIYHLRKKLVDSTDKADLRLIYLALAHMIKFRGHFLIEGDLNPDNSDVDKLFIQLVQTYNQLFEENPINASGVDAKAILSARLSKSRRLENLIAQLPGEKKNGLFGNLIALSLGLTPNFKSNFDLAEDAKLQLSKDTYDDDLDNLLAQIGDQYADLFLAAKNLSDAILLSDILRVNTEITKAPLSASMIKRYDEHHQDLTLLKALVRQQLPEKYKEIFFDQSKNGYAGYIDGGASQEEFYKFIKPILEKMDGTEELLVKLNREDLLRKQRTFDNGSIPHQIHLGELHAILRRQEDFYPFLKDNREKIEKILTFRIPYYVGPLARGNSRFAWMTRKSEETITPWNFEEVVDKGASAQSFIERMTNFDKNLPNEKVLPKHSLLYEYFTVYNELTKVKYVTEGMRKPAFLSGEQKKAIVDLLFKTNRKVTVKQLKEDYFKKIECFDSVEISGVEDRFNASLGTYHDLLKIIKDKDFLDNEENEDILEDIVLTLTLFEDREMIEERLKTYAHLFDDKVMKQLKRRRYTGWGRLSRKLINGIRDKQSGKTILDFLKSDGFANRNFMQLIHDDSLTFKEDIQKAQVSGQGDSLHEHIANLAGSPAIKKGILQTVKVVDELVKVMGRHKPENIVIEMARENQTTQKGQKNSRERMKRIEEGIKELGSQILKEHPVENTQLQNEKLYLYYLQNGRDMYVDQELDINRLSDYDVDHIVPQSFLKDDSIDNKVLTRSDKARGKSDNVPSEEVVKKMKNYWRQLLNAKLITQRKFDNLTKAERGGLSELDKAGFIKRQLVETRQITKHVAQILDSRMNTKYDENDKLIREVKVITLKSKLVSDFRKDFQFYKVREINNYHHAHDAYLNAVVGTALIKKYPKLESEFVYGDYKVYDVRKMIAKSEQEIGKATAKYFFYSNIMNFFKTEITLANGEIRKRPLIETNGETGEIVWDKGRDFATVRKVLSMPQVNIVKKTEVQTGGFSKESILPKRNSDKLIARKKDWDPKKYGGFDSPTVAYSVLVVAKVEKGKSKKLKSVKELLGITIMERSSFEKNPIDFLEAKGYKEVKKDLIIKLPKYSLFELENGRKRMLASAGELQKGNELALPSKYVNFLYLASHYEKLKGSPEDNEQKQLFVEQHKHYLDEIIEQISEFSKRVILADANLDKVLSAYNKHRDKPIREQAENIIHLFTLTNLGAPAAFKYFDTTIDRKRYTSTKEVLDATLIHQSITGLYETRIDLSQLGGDGGSGSETPGTSESATPESGGMDPLQLLQPLEAEIKGTKLKAHWNSGATITCVPEAFLEDERPIQTMLIKTIHGEKQQDVYYLTFKVQGRKVEAEVLASPYDYILLNPSDVPWLMKKPLQLTVLVPLHEYQERLLQQTALPKEQKELLQKLFLKYDALWQHWENQVGHRRIKPHNIATGTLAPRPQKQYPINPKAKPSIQIVIDDLLKQGVLIQQNSTMNTPVYPVPKPDGKWRMVLDYREVNKTIPLIAAQNQHSAGILSSIYRGKYKTTLDLTNGFWAHPITPESYWLTAFTWQGKQYCWTRLPQGFLNSPALFNADVVDLLKEIPNVQAYVDDIYISHDDPQEHLEQLEKIFSILLNAGYVVSLKKSEIAQREVEFLGFNITKEGRGLTDTFKQKLLNITPPKDLKQLQSILGLLNFARNFIPNYSELVKPLYTIVAPANGKFISWTEDNSNQLQHIISVLNQADNLEERNPETRLIIKVNSSPSAGYIRYYNEGSKRPIMYVNYIFSKAEAKFTQTEKLLTTMHKGLIKAMDLAMGQEILVYSPIVSMTKIQRTPLPERKALPVRWITWMTYLEDPRIQFHYDKSLPELQQIPNVTEDVIAKTKHPSEFAMVFYTDGSAIKHPDVNKSHSAGMGIAQVQFIPEYKIVHQWSIPLGDHTAQLAEIAAVEFACKKALKISGPVLIVTDSFYVAESANKELPYWKSNGFLNNKKKPLRHVSKWKSIAECLQLKPDIIIMHEKGHQQPMTTLHTEGNNLADKLATQGSYVVHAGKRTADGSEFEKRTADGSEFESPKKKAKVE

SEQ ID NO: 7704 - protein, 2092 aa, synthetic construct
MPAAKRVKLDGGDKKYSIGLDIGTNSVGWAVITDEYKVPSKKFKVLGNTDRHSIKKNLIGALLFDSGETAEATRLKRTARRRYTRRKNRICYLQEIFSNEMAKVDDSFFHRLEESFLVEEDKKHERHPIFGNIVDEVAYHEKYPTIYHLRKKLVDSTDKADLRLIYLALAHMIKFRGHFLIEGDLNPDNSDVDKLFIQLVQTYNQLFEENPINASGVDAKAILSARLSKSRRLENLIAQLPGEKKNGLFGNLIALSLGLTPNFKSNFDLAEDAKLQLSKDTYDDDLDNLLAQIGDQYADLFLAAKNLSDAILLSDILRVNTEITKAPLSASMIKRYDEHHQDLTLLKALVRQQLPEKYKEIFFDQSKNGYAGYIDGGASQEEFYKFIKPILEKMDGTEELLVKLNREDLLRKQRTFDNGSIPHQIHLGELHAILRRQEDFYPFLKDNREKIEKILTFRIPYYVGPLARGNSRFAWMTRKSEETITPWNFEEVVDKGASAQSFIERMTNFDKNLPNEKVLPKHSLLYEYFTVYNELTKVKYVTEGMRKPAFLSGEQKKAIVDLLFKTNRKVTVKQLKEDYFKKIECFDSVEISGVEDRFNASLGTYHDLLKIIKDKDFLDNEENEDILEDIVLTLTLFEDREMIEERLKTYAHLFDDKVMKQLKRRRYTGWGRLSRKLINGIRDKQSGKTILDFLKSDGFANRNFMQLIHDDSLTFKEDIQKAQVSGQGDSLHEHIANLAGSPAIKKGILQTVKVVDELVKVMGRHKPENIVIEMARENQTTQKGQKNSRERMKRIEEGIKELGSQILKEHPVENTQLQNEKLYLYYLQNGRDMYVDQELDINRLSDYDVDHIVPQSFLKDDSIDNKVLTRSDKARGKSDNVPSEEVVKKMKNYWRQLLNAKLITQRKFDNLTKAERGGLSELDKAGFIKRQLVETRQITKHVAQILDSRMNTKYDENDKLIREVKVITLKSKLVSDFRKDFQFYKVREINNYHHAHDAYLNAVVGTALIKKYPKLESEFVYGDYKVYDVRKMIAKSEQEIGKATAKYFFYSNIMNFFKTEITLANGEIRKRPLIETNGETGEIVWDKGRDFATVRKVLSMPQVNIVKKTEVQTGGFSKESILPKRNSDKLIARKKDWDPKKYGGFDSPTVAYSVLVVAKVEKGKSKKLKSVKELLGITIMERSSFEKNPIDFLEAKGYKEVKKDLIIKLPKYSLFELENGRKRMLASAGELQKGNELALPSKYVNFLYLASHYEKLKGSPEDNEQKQLFVEQHKHYLDEIIEQISEFSKRVILADANLDKVLSAYNKHRDKPIREQAENIIHLFTLTNLGAPAAFKYFDTTIDRKRYTSTKEVLDATLIHQSITGLYETRIDLSQLGGDGGSGSETPGTSESATPESGGIPWLMKKPLQLTTLVPLQEYEERLLKQTMLTGSYKEKLQSLFLKYDALWQHWENQVGHRRIKPHHIATGTVNPRPQKQYPINPKAKASIQTVINDLLKQGVLIQQNSIMNTPVYPVPKPDGKWRMVLDYREVNKTIPLIAAQNQHSAGILSSIFRGKYKTTLDLSNGFWAHSITPESYWLTAFTWLGQQYCWTRLPQGFLNSPALFTADVVDLLKEVPNVQVYVDDIYISHDDPREHLEQLEKVFSLLLNAGYVVSLKKSEIAQHEVEFLGFNITKEGRGLTETFKQKLLNITPPRDLKQLQSILGLLNFARNFIPNFSELVKPLYNIIATANGKYITWTTDNSQQLQNIISMLNSAENLEERNPEVRLIMKVNTSPSAGYIRFYNEFAKRPIMYLNYVYTKAEVKFTNTEKLLTTIHKGLIKALDLGMGQEILVYSPIVSMTKIQKTPLPERKALPIRWITWMSYLEDPRIQFHYDKTLPELQQVPTVTDDIIAKIKHPSEFSMVFYTDGSAIKHPNVNKSHNAGMGIAQVQFKPEFTVINTWSIPLGDHTAQLAEVAAVEFACKKALKIDGPVLIVTDSFYVAESVNKELPYWQSNGFFNNKKKPLKHVSKWKSIADCIQLKPDIIIIHEKGHQPTASTFHTEGNNLADKLATQGSYVVNAGKRTADGSEFEKRTADGSEFESPKKKAKVE

SEQ ID NO: 7705 - protein, 2181 aa, synthetic construct
MPAAKRVKLDGGDKKYSIGLDIGTNSVGWAVITDEYKVPSKKFKVLGNTDRHSIKKNLIGALLFDSGETAEATRLKRTARRRYTRRKNRICYLQEIFSNEMAKVDDSFFHRLEESFLVEEDKKHERHPIFGNIVDEVAYHEKYPTIYHLRKKLVDSTDKADLRLIYLALAHMIKFRGHFLIEGDLNPDNSDVDKLFIQLVQTYNQLFEENPINASGVDAKAILSARLSKSRRLENLIAQLPGEKKNGLFGNLIALSLGLTPNFKSNFDLAEDAKLQLSKDTYDDDLDNLLAQIGDQYADLFLAAKNLSDAILLSDILRVNTEITKAPLSASMIKRYDEHHQDLTLLKALVRQQLPEKYKEIFFDQSKNGYAGYIDGGASQEEFYKFIKPILEKMDGTEELLVKLNREDLLRKQRTFDNGSIPHQIHLGELHAILRRQEDFYPFLKDNREKIEKILTFRIPYYVGPLARGNSRFAWMTRKSEETITPWNFEEVVDKGASAQSFIERMTNFDKNLPNEKVLPKHSLLYEYFTVYNELTKVKYVTEGMRKPAFLSGEQKKAIVDLLFKTNRKVTVKQLKEDYFKKIECFDSVEISGVEDRFNASLGTYHDLLKIIKDKDFLDNEENEDILEDIVLTLTLFEDREMIEERLKTYAHLFDDKVMKQLKRRRYTGWGRLSRKLINGIRDKQSGKTILDFLKSDGFANRNFMQLIHDDSLTFKEDIQKAQVSGQGDSLHEHIANLAGSPAIKKGILQTVKVVDELVKVMGRHKPENIVIEMARENQTTQKGQKNSRERMKRIEEGIKELGSQILKEHPVENTQLQNEKLYLYYLQNGRDMYVDQELDINRLSDYDVDHIVPQSFLKDDSIDNKVLTRSDKARGKSDNVPSEEVVKKMKNYWRQLLNAKLITQRKFDNLTKAERGGLSELDKAGFIKRQLVETRQITKHVAQILDSRMNTKYDENDKLIREVKVITLKSKLVSDFRKDFQFYKVREINNYHHAHDAYLNAVVGTALIKKYPKLESEFVYGDYKVYDVRKMIAKSEQEIGKATAKYFFYSNIMNFFKTEITLANGEIRKRPLIETNGETGEIVWDKGRDFATVRKVLSMPQVNIVKKTEVQTGGFSKESILPKRNSDKLIARKKDWDPKKYGGFDSPTVAYSVLVVAKVEKGKSKKLKSVKELLGITIMERSSFEKNPIDFLEAKGYKEVKKDLIIKLPKYSLFELENGRKRMLASAGELQKGNELALPSKYVNFLYLASHYEKLKGSPEDNEQKQLFVEQHKHYLDEIIEQISEFSKRVILADANLDKVLSAYNKHRDKPIREQAENIIHLFTLTNLGAPAAFKYFDTTIDRKRYTSTKEVLDATLIHQSITGLYETRIDLSQLGGDGGSGSETPGTSESATPESGGMDPLQLLQPLEAEIKGTKLKAHWNSGATITCVPQAFLEEEVPIKNIWIKTIHGEKEQPVYYLTFKIQGRKVEAEVISSPYDYILVSPSDIPWLMKKPLQLTTLVPLQEYEERLLKQTMLTGSYKEKLQSLFLKYDALWQHWENQVGHRRIKPHHIATGTVNPRPQKQYPINPKAKASIQTVINDLLKQGVLIQQNSIMNTPVYPVPKPDGKWRMVLDYREVNKTIPLIAAQNQHSAGILSSIFRGKYKTTLDLSNGFWAHSITPESYWLTAFTWLGQQYCWTRLPQGFLNSPALFNADVVDLLKEVPNVQVYVDDIYISHDDPREHLEQLEKVFSLLLNAGYVVSLKKSEIAQHEVEFLGFNITKEGRGLTETFKQKLLNITPPRDLKQLQSILGLLNFARNFIPNFSELVKPLYNIIATAPGKYITWTTDNSQQLQNIISMLNSAENLEERNPEVRLIMKVNTSPSAGYIRFYNEFAKRPIMYLNYVYTKAEVKFTNTEKLLTTIHKGLIKALDLGMGQEILVYSPIVSMTKIQKTPLPERKALPIRWITWMSYLEDPRIQFHYDKTLPELQQVPTVTDDIIAKIKHPSEFSMVFYTDGSAIKHPNVNKSHNAGMGIAQVQFKPEFTVINTWSIPLGDHTAQLAEVAAVEFACKKALKIDGPVLIVTDSFYVAESVNKELPYWQSNGFFNNKKKPLKHVSKWKSIADCIQLKPDIIIIHEKGHQPTASTFHTEGNNLADKLATQGSYVVNAGKRTADGSEFEKRTADGSEFESPKKKAKVE

SEQ ID NO: 7706 - protein, 2101 aa, synthetic construct
MPAAKRVKLDGGDKKYSIGLDIGTNSVGWAVITDEYKVPSKKFKVLGNTDRHSIKKNLIGALLFDSGETAEATRLKRTARRRYTRRKNRICYLQEIFSNEMAKVDDSFFHRLEESFLVEEDKKHERHPIFGNIVDEVAYHEKYPTIYHLRKKLVDSTDKADLRLIYLALAHMIKFRGHFLIEGDLNPDNSDVDKLFIQLVQTYNQLFEENPINASGVDAKAILSARLSKSRRLENLIAQLPGEKKNGLFGNLIALSLGLTPNFKSNFDLAEDAKLQLSKDTYDDDLDNLLAQIGDQYADLFLAAKNLSDAILLSDILRVNTEITKAPLSASMIKRYDEHHQDLTLLKALVRQQLPEKYKEIFFDQSKNGYAGYIDGGASQEEFYKFIKPILEKMDGTEELLVKLNREDLLRKQRTFDNGSIPHQIHLGELHAILRRQEDFYPFLKDNREKIEKILTFRIPYYVGPLARGNSRFAWMTRKSEETITPWNFEEVVDKGASAQSFIERMTNFDKNLPNEKVLPKHSLLYEYFTVYNELTKVKYVTEGMRKPAFLSGEQKKAIVDLLFKTNRKVTVKQLKEDYFKKIECFDSVEISGVEDRFNASLGTYHDLLKIIKDKDFLDNEENEDILEDIVLTLTLFEDREMIEERLKTYAHLFDDKVMKQLKRRRYTGWGRLSRKLINGIRDKQSGKTILDFLKSDGFANRNFMQLIHDDSLTFKEDIQKAQVSGQGDSLHEHIANLAGSPAIKKGILQTVKVVDELVKVMGRHKPENIVIEMARENQTTQKGQKNSRERMKRIEEGIKELGSQILKEHPVENTQLQNEKLYLYYLQNGRDMYVDQELDINRLSDYDVDHIVPQSFLKDDSIDNKVLTRSDKARGKSDNVPSEEVVKKMKNYWRQLLNAKLITQRKFDNLTKAERGGLSELDKAGFIKRQLVETRQITKHVAQILDSRMNTKYDENDKLIREVKVITLKSKLVSDFRKDFQFYKVREINNYHHAHDAYLNAVVGTALIKKYPKLESEFVYGDYKVYDVRKMIAKSEQEIGKATAKYFFYSNIMNFFKTEITLANGEIRKRPLIETNGETGEIVWDKGRDFATVRKVLSMPQVNIVKKTEVQTGGFSKESILPKRNSDKLIARKKDWDPKKYGGFDSPTVAYSVLVVAKVEKGKSKKLKSVKELLGITIMERSSFEKNPIDFLEAKGYKEVKKDLIIKLPKYSLFELENGRKRMLASAGELQKGNELALPSKYVNFLYLASHYEKLKGSPEDNEQKQLFVEQHKHYLDEIIEQISEFSKRVILADANLDKVLSAYNKHRDKPIREQAENIIHLFTLTNLGAPAAFKYFDTTIDRKRYTSTKEVLDATLIHQSITGLYETRIDLSQLGGDGGSGSETPGTSESATPESGGTLNIEDEYRLHETSKEPDVPLGSTWLSDFPQAWAETGGMGLAVRQAPLIIPLKATSTPVSIKQYPMSQEARLGIKPHIQRLLDQGILVPCQSPWNTPLLPVKKPGTNDYRPVQDLREVNKRVEDIHPTVPNPYNLLSGLPPSHQWYTVLDLKDAFFCLRLHPTSQPLFAFEWRDPEMGISGQLTWTRLPQGFKNSPTLFNEALHRDLADFRIQHPDLILLQYVDDLLLAATSEQDCQRGTRALLQTLGNLGYRASAKKAQICQKQVKYLGYLLKEGQRWLTEARKETVMGQPTPKTPRQLREFLGTAGFCRLWIPGFAEMAAPLYPLTKPGTLFNWGPDQQKAYQEIKQALLTAPALGLPDLTKPFELFVDEKQGYAKGVLTQKLGPWRRPVAYLSKKLDPVAAGWPPCLRMVAAIAVLTKDAGKLTMGQPLVILAPHAVEALVKQPPDRWLSNARMTHYQAMLLDTDRVQFGPVVALNPATLLPLPEKEAPHDCLEILAETHGTRPDLTDQPIPDADYTWYTDGSSFLQEGQRRAGAAVTTETEVIWARALPAGTSAQRAELIALTQALKMAEGKKLNVYTDSRYAFATAHVHGEIYRRRGWLTSEGREIKNKNEILALLKALFLPKRLSIIHCPGHQKGNSAEARGNRMADQAAREAAMKAVLETSTLLAGKRTADGSEFEKRTADGSEFESPKKKAKVE

SEQ ID NO: 7707 - protein, 2099 aa, synthetic construct
MPAAKRVKLDGGDKKYSIGLDIGTNSVGWAVITDEYKVPSKKFKVLGNTDRHSIKKNLIGALLFDSGETAEATRLKRTARRRYTRRKNRICYLQEIFSNEMAKVDDSFFHRLEESFLVEEDKKHERHPIFGNIVDEVAYHEKYPTIYHLRKKLVDSTDKADLRLIYLALAHMIKFRGHFLIEGDLNPDNSDVDKLFIQLVQTYNQLFEENPINASGVDAKAILSARLSKSRRLENLIAQLPGEKKNGLFGNLIALSLGLTPNFKSNFDLAEDAKLQLSKDTYDDDLDNLLAQIGDQYADLFLAAKNLSDAILLSDILRVNTEITKAPLSASMIKRYDEHHQDLTLLKALVRQQLPEKYKEIFFDQSKNGYAGYIDGGASQEEFYKFIKPILEKMDGTEELLVKLNREDLLRKQRTFDNGSIPHQIHLGELHAILRRQEDFYPFLKDNREKIEKILTFRIPYYVGPLARGNSRFAWMTRKSEETITPWNFEEVVDKGASAQSFIERMTNFDKNLPNEKVLPKHSLLYEYFTVYNELTKVKYVTEGMRKPAFLSGEQKKAIVDLLFKTNRKVTVKQLKEDYFKKIECFDSVEISGVEDRFNASLGTYHDLLKIIKDKDFLDNEENEDILEDIVLTLTLFEDREMIEERLKTYAHLFDDKVMKQLKRRRYTGWGRLSRKLINGIRDKQSGKTILDFLKSDGFANRNFMQLIHDDSLTFKEDIQKAQVSGQGDSLHEHIANLAGSPAIKKGILQTVKVVDELVKVMGRHKPENIVIEMARENQTTQKGQKNSRERMKRIEEGIKELGSQILKEHPVENTQLQNEKLYLYYLQNGRDMYVDQELDINRLSDYDVDHIVPQSFLKDDSIDNKVLTRSDKARGKSDNVPSEEVVKKMKNYWRQLLNAKLITQRKFDNLTKAERGGLSELDKAGFIKRQLVETRQITKHVAQILDSRMNTKYDENDKLIREVKVITLKSKLVSDFRKDFQFYKVREINNYHHAHDAYLNAVVGTALIKKYPKLESEFVYGDYKVYDVRKMIAKSEQEIGKATAKYFFYSNIMNFFKTEITLANGEIRKRPLIETNGETGEIVWDKGRDFATVRKVLSMPQVNIVKKTEVQTGGFSKESILPKRNSDKLIARKKDWDPKKYGGFDSPTVAYSVLVVAKVEKGKSKKLKSVKELLGITIMERSSFEKNPIDFLEAKGYKEVKKDLIIKLPKYSLFELENGRKRMLASAGELQKGNELALPSKYVNFLYLASHYEKLKGSPEDNEQKQLFVEQHKHYLDEIIEQISEFSKRVILADANLDKVLSAYNKHRDKPIREQAENIIHLFTLTNLGAPAAFKYFDTTIDRKRYTSTKEVLDATLIHQSITGLYETRIDLSQLGGDGGGSAGSAAGSGEFGGTAPLEEEYRLFLEAPIQNVTLLEQWKREIPKVWAEINPPGLASTQAPIHVQLLSTALPVRVRQYPITLEAKRSLRETIRKFRAAGILRPVHSPWNTPLLPVRKSGTSEYRMVQDLREVNKRVETIHPTVPNPYTLLSLLPPDRIWYSVLDLKDAFFCIPLAPESQLIFAFEWADAEEGESGQLTWTRLPQGFKNSPTLFNEALNRDLQGFRLDHPSVSLLQYVDDLLIAADTQAACLSATRDLLMTLAELGYRVSGKKAQLCQEEVTYLGFKIHKGSRSLSNSRTQAILQIPVPKTKRQVREFLGTIGYCRLWIPGFAELAQPLYAATRPGNDPLVWGEKEEEAFQSLKLALTQPPALALPSLDKPFQLFVEETSGAAKGVLTQALGPWKRPVAYLSKRLDPVAAGWPRCLRAIAAAALLTREASKLTFGQDIEITSSHNLESLLRSPPDKWLTNARITQYQVLLLDPPRVRFKQTAALNPATLLPETDDTLPIHHCLDTLDSLTSTRPDLTDQPLAQAEATLFTDGSSYIRDGKRYAGAAVVTLDSVIWAEPLPIGTSAQKAELIALTKALEWSKDKSVNIYTDSRYAFATLHVHGMIYRERGWLTAGGKAIKNAPEILALLTAVWLPKRVAVMHCKGHQKDDAPTSTGNRRADEVAREVAIRPLSTQATISAGKRTADGSEFEKRTADGSEFESPKKKAKVE

SEQ ID NO: 7708 - protein, 2002 aa, synthetic construct
MPAAKRVKLDGGDKKYSIGLDIGTNSVGWAVITDEYKVPSKKFKVLGNTDRHSIKKNLIGALLFDSGETAEATRLKRTARRRYTRRKNRICYLQEIFSNEMAKVDDSFFHRLEESFLVEEDKKHERHPIFGNIVDEVAYHEKYPTIYHLRKKLVDSTDKADLRLIYLALAHMIKFRGHFLIEGDLNPDNSDVDKLFIQLVQTYNQLFEENPINASGVDAKAILSARLSKSRRLENLIAQLPGEKKNGLFGNLIALSLGLTPNFKSNFDLAEDAKLQLSKDTYDDDLDNLLAQIGDQYADLFLAAKNLSDAILLSDILRVNTEITKAPLSASMIKRYDEHHQDLTLLKALVRQQLPEKYKEIFFDQSKNGYAGYIDGGASQEEFYKFIKPILEKMDGTEELLVKLNREDLLRKQRTFDNGSIPHQIHLGELHAILRRQEDFYPFLKDNREKIEKILTFRIPYYVGPLARGNSRFAWMTRKSEETITPWNFEEVVDKGASAQSFIERMTNFDKNLPNEKVLPKHSLLYEYFTVYNELTKVKYVTEGMRKPAFLSGEQKKAIVDLLFKTNRKVTVKQLKEDYFKKIECFDSVEISGVEDRFNASLGTYHDLLKIIKDKDFLDNEENEDILEDIVLTLTLFEDREMIEERLKTYAHLFDDKVMKQLKRRRYTGWGRLSRKLINGIRDKQSGKTILDFLKSDGFANRNFMQLIHDDSLTFKEDIQKAQVSGQGDSLHEHIANLAGSPAIKKGILQTVKVVDELVKVMGRHKPENIVIEMARENQTTQKGQKNSRERMKRIEEGIKELGSQILKEHPVENTQLQNEKLYLYYLQNGRDMYVDQELDINRLSDYDVDHIVPQSFLKDDSIDNKVLTRSDKARGKSDNVPSEEVVKKMKNYWRQLLNAKLITQRKFDNLTKAERGGLSELDKAGFIKRQLVETRQITKHVAQILDSRMNTKYDENDKLIREVKVITLKSKLVSDFRKDFQFYKVREINNYHHAHDAYLNAVVGTALIKKYPKLESEFVYGDYKVYDVRKMIAKSEQEIGKATAKYFFYSNIMNFFKTEITLANGEIRKRPLIETNGETGEIVWDKGRDFATVRKVLSMPQVNIVKKTEVQTGGFSKESILPKRNSDKLIARKKDWDPKKYGGFDSPTVAYSVLVVAKVEKGKSKKLKSVKELLGITIMERSSFEKNPIDFLEAKGYKEVKKDLIIKLPKYSLFELENGRKRMLASAGELQKGNELALPSKYVNFLYLASHYEKLKGSPEDNEQKQLFVEQHKHYLDEIIEQISEFSKRVILADANLDKVLSAYNKHRDKPIREQAENIIHLFTLTNLGAPAAFKYFDTTIDRKRYTSTKEVLDATLIHQSITGLYETRIDLSQLGGDGGGSAGSAAGSGEFGGGVLDTPPSHIGLEHLPPPPEVPQFPLNLERLQALQDLVHRSLEAGYISPWDGPGNNPVFPVRKPNGAWRFVHDLRATNALTKPIPALSPGPPDLTAPPTHPPHIICLDLKDAFFQIPVEDRFRFYLSFTLPSPGGLQPHRRFAWRVLPQGFINSPALFQRALQEPLRQVSAAFSQSLLVSYMDDILYASPTEEQRSQCYQALAARLRDLGFQVASEKTSQTPSPVPFLGQMVHEQIVTYQSLPTLQISSPISLHQLQAVLGDLQWVSRGTPTTRRPLQLLYSSLKRHHDPRAIIQLSPEQLQGIAELRQALSHNARSRYNEQEPLLAYVHLTRAGSTLVLFQKGAQFPLAYFQTPLTDNQASPWGLLLLLGCQYLQTQALSSYAKPILKYYHNLPKTSLDNWIQSSEDPRVQELLQLWPQISSQGIQPPGPWKTLITRAEVFLTPQFSPDPIPAALCLFSDGATGRGAYCLWKDHLLDFQAVPAPESAQKGELAGLLAGLAAAPPEPVNIWVDSKYLYSLLRTWVLGAWLQPDPVPSYALLYKSLLRHPAIVVGHVRSHSSASHPIASLNNYVDQLAGKRTADGSEFEKRTADGSEFESPKKKAKVE

SEQ ID NO: 7709 - protein, 2088 aa, synthetic construct
MPAAKRVKLDGGDKKYSIGLDIGTNSVGWAVITDEYKVPSKKFKVLGNTDRHSIKKNLIGALLFDSGETAEATRLKRTARRRYTRRKNRICYLQEIFSNEMAKVDDSFFHRLEESFLVEEDKKHERHPIFGNIVDEVAYHEKYPTIYHLRKKLVDSTDKADLRLIYLALAHMIKFRGHFLIEGDLNPDNSDVDKLFIQLVQTYNQLFEENPINASGVDAKAILSARLSKSRRLENLIAQLPGEKKNGLFGNLIALSLGLTPNFKSNFDLAEDAKLQLSKDTYDDDLDNLLAQIGDQYADLFLAAKNLSDAILLSDILRVNTEITKAPLSASMIKRYDEHHQDLTLLKALVRQQLPEKYKEIFFDQSKNGYAGYIDGGASQEEFYKFIKPILEKMDGTEELLVKLNREDLLRKQRTFDNGSIPHQIHLGELHAILRRQEDFYPFLKDNREKIEKILTFRIPYYVGPLARGNSRFAWMTRKSEETITPWNFEEVVDKGASAQSFIERMTNFDKNLPNEKVLPKHSLLYEYFTVYNELTKVKYVTEGMRKPAFLSGEQKKAIVDLLFKTNRKVTVKQLKEDYFKKIECFDSVEISGVEDRFNASLGTYHDLLKIIKDKDFLDNEENEDILEDIVLTLTLFEDREMIEERLKTYAHLFDDKVMKQLKRRRYTGWGRLSRKLINGIRDKQSGKTILDFLKSDGFANRNFMQLIHDDSLTFKEDIQKAQVSGQGDSLHEHIANLAGSPAIKKGILQTVKVVDELVKVMGRHKPENIVIEMARENQTTQKGQKNSRERMKRIEEGIKELGSQILKEHPVENTQLQNEKLYLYYLQNGRDMYVDQELDINRLSDYDVDHIVPQSFLKDDSIDNKVLTRSDKARGKSDNVPSEEVVKKMKNYWRQLLNAKLITQRKFDNLTKAERGGLSELDKAGFIKRQLVETRQITKHVAQILDSRMNTKYDENDKLIREVKVITLKSKLVSDFRKDFQFYKVREINNYHHAHDAYLNAVVGTALIKKYPKLESEFVYGDYKVYDVRKMIAKSEQEIGKATAKYFFYSNIMNFFKTEITLANGEIRKRPLIETNGETGEIVWDKGRDFATVRKVLSMPQVNIVKKTEVQTGGFSKESILPKRNSDKLIARKKDWDPKKYGGFDSPTVAYSVLVVAKVEKGKSKKLKSVKELLGITIMERSSFEKNPIDFLEAKGYKEVKKDLIIKLPKYSLFELENGRKRMLASAGELQKGNELALPSKYVNFLYLASHYEKLKGSPEDNEQKQLFVEQHKHYLDEIIEQISEFSKRVILADANLDKVLSAYNKHRDKPIREQAENIIHLFTLTNLGAPAAFKYFDTTIDRKRYTSTKEVLDATLIHQSITGLYETRIDLSQLGGDGGGSAGSAAGSGEFGGVPWILKKPLELTIKLDLEEQQGTLLNNSILSKKGKEELKQLFEKYSALWQSWENQVGHRRIRPHKIATGTVKPTPQKQYHINPKAKPDIQIVINDLLKQGVLIQKESTMNTPVYPVPKPNGRWRMVLDYRAVNKVTPLIAVQNQHSYGILGSLFKGRYKTTIDLSNGFWAHPIVPEDYWITAFTWQGKQYCWTVLPQGFLNSPGLFTGDVVDLLQGIPNVEVYVDDVYISHDSEKEHLEYLDILFNRLKEAGYIISLKKSNIANSIVDFLGFQITNEGRGLTDTFKEKLENITAPTTLKQLQSILGLLNFARNFIPDFTELIAPLYALIPKSTKNYVPWQIEHSTTLETLITKLNGAEYLQGRKGDKTLIMKVNASYTTGYIRYYNEGEKKPISYVSIVFSKTELKFTELEKLLTTVHKGLLKALDLSMGQNIHVYSPIVSMQNIQKTPQTAKKALASRWLSWLSYLEDPRIRFFYDPQMPALKDLPAVDTGKDNKKHPSNFQHIFYTDGSAITSPTKEGHLNAGMGIVYFINKDGNLQKQQEWSISLGNHTAQFAEIAAFEFALKKCLPLGGNILVVTDSNYVAKAYNEELDVWASNGFVNNRKKPLKHISKWKSVADLKRLRPDVVVTHEPGHQKLDSSPHAYGNNLADQLATQASFKVHAGKRTADGSEFEKRTADGSEFESPKKKAKVE

SEQ ID NO: 7710 - protein, 2088 aa, synthetic construct
MPAAKRVKLDGGDKKYSIGLDIGTNSVGWAVITDEYKVPSKKFKVLGNTDRHSIKKNLIGALLFDSGETAEATRLKRTARRRYTRRKNRICYLQEIFSNEMAKVDDSFFHRLEESFLVEEDKKHERHPIFGNIVDEVAYHEKYPTIYHLRKKLVDSTDKADLRLIYLALAHMIKFRGHFLIEGDLNPDNSDVDKLFIQLVQTYNQLFEENPINASGVDAKAILSARLSKSRRLENLIAQLPGEKKNGLFGNLIALSLGLTPNFKSNFDLAEDAKLQLSKDTYDDDLDNLLAQIGDQYADLFLAAKNLSDAILLSDILRVNTEITKAPLSASMIKRYDEHHQDLTLLKALVRQQLPEKYKEIFFDQSKNGYAGYIDGGASQEEFYKFIKPILEKMDGTEELLVKLNREDLLRKQRTFDNGSIPHQIHLGELHAILRRQEDFYPFLKDNREKIEKILTFRIPYYVGPLARGNSRFAWMTRKSEETITPWNFEEVVDKGASAQSFIERMTNFDKNLPNEKVLPKHSLLYEYFTVYNELTKVKYVTEGMRKPAFLSGEQKKAIVDLLFKTNRKVTVKQLKEDYFKKIECFDSVEISGVEDRFNASLGTYHDLLKIIKDKDFLDNEENEDILEDIVLTLTLFEDREMIEERLKTYAHLFDDKVMKQLKRRRYTGWGRLSRKLINGIRDKQSGKTILDFLKSDGFANRNFMQLIHDDSLTFKEDIQKAQVSGQGDSLHEHIANLAGSPAIKKGILQTVKVVDELVKVMGRHKPENIVIEMARENQTTQKGQKNSRERMKRIEEGIKELGSQILKEHPVENTQLQNEKLYLYYLQNGRDMYVDQELDINRLSDYDVDHIVPQSFLKDDSIDNKVLTRSDKARGKSDNVPSEEVVKKMKNYWRQLLNAKLITQRKFDNLTKAERGGLSELDKAGFIKRQLVETRQITKHVAQILDSRMNTKYDENDKLIREVKVITLKSKLVSDFRKDFQFYKVREINNYHHAHDAYLNAVVGTALIKKYPKLESEFVYGDYKVYDVRKMIAKSEQEIGKATAKYFFYSNIMNFFKTEITLANGEIRKRPLIETNGETGEIVWDKGRDFATVRKVLSMPQVNIVKKTEVQTGGFSKESILPKRNSDKLIARKKDWDPKKYGGFDSPTVAYSVLVVAKVEKGKSKKLKSVKELLGITIMERSSFEKNPIDFLEAKGYKEVKKDLIIKLPKYSLFELENGRKRMLASAGELQKGNELALPSKYVNFLYLASHYEKLKGSPEDNEQKQLFVEQHKHYLDEIIEQISEFSKRVILADANLDKVLSAYNKHRDKPIREQAENIIHLFTLTNLGAPAAFKYFDTTIDRKRYTSTKEVLDATLIHQSITGLYETRIDLSQLGGDGGGSAGSAAGSGEFGGVPWILKKPLELTIKLDLEEQQGTLLNNSILSKKGKEELKQLFEKYSALWQSWENQVGHRRIRPHKIATGTVKPTPQKQYHINPKAKPDIQIVINDLLKQGVLIQKESTMNTPVYPVPKPNGRWRMVLDYRAVNKVTPLIAVQNQHSYGILGSLFKGRYKTTIDLSNGFWAHPIVPEDYWITAFTWQGKQYCWTVLPQGFLNSPGLFNGDVVDLLQGIPNVEVYVDDVYISHDSEKEHLEYLDILFNRLKEAGYIISLKKSNIANSIVDFLGFQITNEGRGLTDTFKEKLENITAPTTLKQLQSILGLLNFARNFIPDFTELIAPLYALIPKSPKNYVPWQIEHSTTLETLITKLNGAEYLQGRKGDKTLIMKVNASYTTGYIRYYNEGEKKPISYVSIVFSKTELKFTELEKLLTTVHKGLLKALDLSMGQNIHVYSPIVSMQNIQKTPQTAKKALASRWLSWLSYLEDPRIRFFYDPQMPALKDLPAVDTGKDNKKHPSNFQHIFYTDGSAITSPTKEGHLNAGMGIVYFINKDGNLQKQQEWSISLGNHTAQFAEIAAFEFALKKCLPLGGNILVVTDSNYVAKAYNEELDVWASNGFVNNRKKPLKHISKWKSVADLKRLRPDVVVTHEPGHQKLDSSPHAYGNNLADQLATQASFKVHAGKRTADGSEFEKRTADGSEFESPKKKAKVE

SEQ ID NO: 7711 - protein, 2096 aa, synthetic construct
MPAAKRVKLDGGDKKYSIGLDIGTNSVGWAVITDEYKVPSKKFKVLGNTDRHSIKKNLIGALLFDSGETAEATRLKRTARRRYTRRKNRICYLQEIFSNEMAKVDDSFFHRLEESFLVEEDKKHERHPIFGNIVDEVAYHEKYPTIYHLRKKLVDSTDKADLRLIYLALAHMIKFRGHFLIEGDLNPDNSDVDKLFIQLVQTYNQLFEENPINASGVDAKAILSARLSKSRRLENLIAQLPGEKKNGLFGNLIALSLGLTPNFKSNFDLAEDAKLQLSKDTYDDDLDNLLAQIGDQYADLFLAAKNLSDAILLSDILRVNTEITKAPLSASMIKRYDEHHQDLTLLKALVRQQLPEKYKEIFFDQSKNGYAGYIDGGASQEEFYKFIKPILEKMDGTEELLVKLNREDLLRKQRTFDNGSIPHQIHLGELHAILRRQEDFYPFLKDNREKIEKILTFRIPYYVGPLARGNSRFAWMTRKSEETITPWNFEEVVDKGASAQSFIERMTNFDKNLPNEKVLPKHSLLYEYFTVYNELTKVKYVTEGMRKPAFLSGEQKKAIVDLLFKTNRKVTVKQLKEDYFKKIECFDSVEISGVEDRFNASLGTYHDLLKIIKDKDFLDNEENEDILEDIVLTLTLFEDREMIEERLKTYAHLFDDKVMKQLKRRRYTGWGRLSRKLINGIRDKQSGKTILDFLKSDGFANRNFMQLIHDDSLTFKEDIQKAQVSGQGDSLHEHIANLAGSPAIKKGILQTVKVVDELVKVMGRHKPENIVIEMARENQTTQKGQKNSRERMKRIEEGIKELGSQILKEHPVENTQLQNEKLYLYYLQNGRDMYVDQELDINRLSDYDVDHIVPQSFLKDDSIDNKVLTRSDKARGKSDNVPSEEVVKKMKNYWRQLLNAKLITQRKFDNLTKAERGGLSELDKAGFIKRQLVETRQITKHVAQILDSRMNTKYDENDKLIREVKVITLKSKLVSDFRKDFQFYKVREINNYHHAHDAYLNAVVGTALIKKYPKLESEFVYGDYKVYDVRKMIAKSEQEIGKATAKYFFYSNIMNFFKTEITLANGEIRKRPLIETNGETGEIVWDKGRDFATVRKVLSMPQVNIVKKTEVQTGGFSKESILPKRNSDKLIARKKDWDPKKYGGFDSPTVAYSVLVVAKVEKGKSKKLKSVKELLGITIMERSSFEKNPIDFLEAKGYKEVKKDLIIKLPKYSLFELENGRKRMLASAGELQKGNELALPSKYVNFLYLASHYEKLKGSPEDNEQKQLFVEQHKHYLDEIIEQISEFSKRVILADANLDKVLSAYNKHRDKPIREQAENIIHLFTLTNLGAPAAFKYFDTTIDRKRYTSTKEVLDATLIHQSITGLYETRIDLSQLGGDGGGSAGSAAGSGEFGGTLQLEEEYRLFEPESTQKQEMDIWLKNFPQAWAETGGMGTAHCQAPVLIQLKATATPISIRQYPMPHEAYQGIKPHIRRMLDQGILKPCQSPWNTPLLPVKKPGTEDYRPVQDLREVNKRVEDIHPTVPNPYNLLSTLPPSHPWYTVLDLKDAFFCLRLHSESQLLFAFEWRDPEIGLSGQLTWTRLPQGFKNSPTLFNEALHSDLADFRVRYPALVLLQYVDDLLLAAATRTECLEGTKALLETLGNKGYRASAKKAQICLQEVTYLGYSLKDGQRWLTKARKEAILSIPVPKNSRQVREFLGKAGYCRLFIPGFAELAAPLYPLTRPGTLFQWGTEQQLAFEDIKKALLSSPALGLPDITKPFELFIDENSGFAKGVLVQKLGPWKRPVAYLSKKLDTVASGWPPCLRMVAAIAILVKDAGKLTLGQPLTILTSHPVEALVRQPPNKWLSNARMTHYQAMLLDAERVHFGPTVSLNPATLLPLPSGGNHHDCLQILAETHGTRPDLTDQPLPDADLTWYTDGSSFIRNGEREAGAAVTTESEVIWAAPLPPGTSAQRAELIALTQALKMAEGKKLTVYTDSRYAFATTHVHGEIYRRRGWLTSEGKEIKNKNEILALLEALFLPKRLSIIHCPGHQKGDSPQAKGNRLADDTAKKAATETHSSLTVLPAGKRTADGSEFEKRTADGSEFESPKKKAKVE

SEQ ID NO: 7712 - protein, 2095 aa, synthetic construct
MPAAKRVKLDGGDKKYSIGLDIGTNSVGWAVITDEYKVPSKKFKVLGNTDRHSIKKNLIGALLFDSGETAEATRLKRTARRRYTRRKNRICYLQEIFSNEMAKVDDSFFHRLEESFLVEEDKKHERHPIFGNIVDEVAYHEKYPTIYHLRKKLVDSTDKADLRLIYLALAHMIKFRGHFLIEGDLNPDNSDVDKLFIQLVQTYNQLFEENPINASGVDAKAILSARLSKSRRLENLIAQLPGEKKNGLFGNLIALSLGLTPNFKSNFDLAEDAKLQLSKDTYDDDLDNLLAQIGDQYADLFLAAKNLSDAILLSDILRVNTEITKAPLSASMIKRYDEHHQDLTLLKALVRQQLPEKYKEIFFDQSKNGYAGYIDGGASQEEFYKFIKPILEKMDGTEELLVKLNREDLLRKQRTFDNGSIPHQIHLGELHAILRRQEDFYPFLKDNREKIEKILTFRIPYYVGPLARGNSRFAWMTRKSEETITPWNFEEVVDKGASAQSFIERMTNFDKNLPNEKVLPKHSLLYEYFTVYNELTKVKYVTEGMRKPAFLSGEQKKAIVDLLFKTNRKVTVKQLKEDYFKKIECFDSVEISGVEDRFNASLGTYHDLLKIIKDKDFLDNEENEDILEDIVLTLTLFEDREMIEERLKTYAHLFDDKVMKQLKRRRYTGWGRLSRKLINGIRDKQSGKTILDFLKSDGFANRNFMQLIHDDSLTFKEDIQKAQVSGQGDSLHEHIANLAGSPAIKKGILQTVKVVDELVKVMGRHKPENIVIEMARENQTTQKGQKNSRERMKRIEEGIKELGSQILKEHPVENTQLQNEKLYLYYLQNGRDMYVDQELDINRLSDYDVDHIVPQSFLKDDSIDNKVLTRSDKARGKSDNVPSEEVVKKMKNYWRQLLNAKLITQRKFDNLTKAERGGLSELDKAGFIKRQLVETRQITKHVAQILDSRMNTKYDENDKLIREVKVITLKSKLVSDFRKDFQFYKVREINNYHHAHDAYLNAVVGTALIKKYPKLESEFVYGDYKVYDVRKMIAKSEQEIGKATAKYFFYSNIMNFFKTEITLANGEIRKRPLIETNGETGEIVWDKGRDFATVRKVLSMPQVNIVKKTEVQTGGFSKESILPKRNSDKLIARKKDWDPKKYGGFDSPTVAYSVLVVAKVEKGKSKKLKSVKELLGITIMERSSFEKNPIDFLEAKGYKEVKKDLIIKLPKYSLFELENGRKRMLASAGELQKGNELALPSKYVNFLYLASHYEKLKGSPEDNEQKQLFVEQHKHYLDEIIEQISEFSKRVILADANLDKVLSAYNKHRDKPIREQAENIIHLFTLTNLGAPAAFKYFDTTIDRKRYTSTKEVLDATLIHQSITGLYETRIDLSQLGGDGGGSAGSAAGSGEFGGVLNLEEEYRLHEKPVPSSIDPSWLQLFPTVWAERAGMGLANQVPPVVVELRSGASPVAVRQYPMSKEAREGIRPHIQKFLDLGVLVPCRSPWNTPLLPVKKPGTNDYRPVQDLREINKRVQDIHPTVPNPYNLLSSLPPSYTWYSVLDLKDAFFCLRLHPNSQPLFAFEWKDPEKGNTGQLTWTRLPQGFKNSPTLFNEALHRDLAPFRALNPQVVLLQYVDDLLVAAPTYEDCKKGTQKLLQELSKLGYRVSAKKAQLCQREVTYLGYLLKEGKRWLTPARKATVMKIPVPTTPRQVREFLGKAGFCRLFIPGFASLAAPLYPLTKPSIPFIWTEEHQQAFDHIKKALLSAPALALPDLTKPFTLYIDERAGVARGVLTQTLGPWRRPVAYLSKKLDPVASGWPTCLKAVAAVALLLKDADKLTLGQNVTVIASHSLESIVRQPPDRWMTNARMTHYQSLLLNERVSFAPPAVLNPATLLPVESEATPVHRCSEILAEETGTRRDLEDQPLPGVPTWYTDGSSFITEGKRRAGAPIVDGKRTVWASSLPEGTSAQKAELVALTQALRLAEGKNINIYTDSRYAFATAHIHGAIYKQRGWLTSAGKDIKNKEEILALLEAIHLPRRVAIIHCPGHQRGSNPVATGNRRADEAAKQAALSTRVLAGTTKPAGKRTADGSEFEKRTADGSEFESPKKKAKVE

SEQ ID NO: 7713 - protein, 2219 aa, synthetic construct
MPAAKRVKLDGGDKKYSIGLDIGTNSVGWAVITDEYKVPSKKFKVLGNTDRHSIKKNLIGALLFDSGETAEATRLKRTARRRYTRRKNRICYLQEIFSNEMAKVDDSFFHRLEESFLVEEDKKHERHPIFGNIVDEVAYHEKYPTIYHLRKKLVDSTDKADLRLIYLALAHMIKFRGHFLIEGDLNPDNSDVDKLFIQLVQTYNQLFEENPINASGVDAKAILSARLSKSRRLENLIAQLPGEKKNGLFGNLIALSLGLTPNFKSNFDLAEDAKLQLSKDTYDDDLDNLLAQIGDQYADLFLAAKNLSDAILLSDILRVNTEITKAPLSASMIKRYDEHHQDLTLLKALVRQQLPEKYKEIFFDQSKNGYAGYIDGGASQEEFYKFIKPILEKMDGTEELLVKLNREDLLRKQRTFDNGSIPHQIHLGELHAILRRQEDFYPFLKDNREKIEKILTFRIPYYVGPLARGNSRFAWMTRKSEETITPWNFEEVVDKGASAQSFIERMTNFDKNLPNEKVLPKHSLLYEYFTVYNELTKVKYVTEGMRKPAFLSGEQKKAIVDLLFKTNRKVTVKQLKEDYFKKIECFDSVEISGVEDRFNASLGTYHDLLKIIKDKDFLDNEENEDILEDIVLTLTLFEDREMIEERLKTYAHLFDDKVMKQLKRRRYTGWGRLSRKLINGIRDKQSGKTILDFLKSDGFANRNFMQLIHDDSLTFKEDIQKAQVSGQGDSLHEHIANLAGSPAIKKGILQTVKVVDELVKVMGRHKPENIVIEMARENQTTQKGQKNSRERMKRIEEGIKELGSQILKEHPVENTQLQNEKLYLYYLQNGRDMYVDQELDINRLSDYDVDHIVPQSFLKDDSIDNKVLTRSDKARGKSDNVPSEEVVKKMKNYWRQLLNAKLITQRKFDNLTKAERGGLSELDKAGFIKRQLVETRQITKHVAQILDSRMNTKYDENDKLIREVKVITLKSKLVSDFRKDFQFYKVREINNYHHAHDAYLNAVVGTALIKKYPKLESEFVYGDYKVYDVRKMIAKSEQEIGKATAKYFFYSNIMNFFKTEITLANGEIRKRPLIETNGETGEIVWDKGRDFATVRKVLSMPQVNIVKKTEVQTGGFSKESILPKRNSDKLIARKKDWDPKKYGGFDSPTVAYSVLVVAKVEKGKSKKLKSVKELLGITIMERSSFEKNPIDFLEAKGYKEVKKDLIIKLPKYSLFELENGRKRMLASAGELQKGNELALPSKYVNFLYLASHYEKLKGSPEDNEQKQLFVEQHKHYLDEIIEQISEFSKRVILADANLDKVLSAYNKHRDKPIREQAENIIHLFTLTNLGAPAAFKYFDTTIDRKRYTSTKEVLDATLIHQSITGLYETRIDLSQLGGDGGGSAGSAAGSGEFGGTLGDQGSRGSDPLPEPRVTLTVEGIPTEFLVNTGAEHSVLTKPMGKMGSKRTVVAGATGSKVYPWTTKRLLKIGQKQVTHSFLVIPECPAPLLGRDLLTKLKAQIQFSTEGPQVTWEDRPAMCLVLNLEEEYRLHEKPVPPSIDPSWLQLFPMVWAEKAGMGLANQVPPVVVELKSDASPVAVRQYPMSKEAREGIRPHIQRFLDLGILVPCQSPWNTPLLPVKKPGTNDYRPVQDLREVNKRVQDIHPTVPNPYNLLSSLPPSHTWYSVLDLKDAFFCLKLHPNSQPLFAFEWRDPEKGNTGQLTWTRLPQGFKNSPTLFDEALHRDLASFRALNPQVVMLQYVDDLLVAAPTYRDCKEGTRRLLQELSKLGYRVSAKKAQLCREEVTYLGYLLKGGKRWLTPARKATVMKIPTPTTPRQVREFLGTAGFCRLWIPGFASLAAPLYPLTREKVPFTWTEAHQEAFGRIKEALLSAPALALPDLTKPFALYVDEKEGVARGVLTQTLGPWRRPVAYLSKKLDPVASGWPTCLKAIAAVALLLKDADKLTLGQNVLVIAPHNLESIVRQPPDRWMTNARMTHYQSLLLNERVSFAPPAILNPATLLPVESDDTPIHICSEILAEETGTRPDLRDQPLPGVPAWYTDGSSFIMDGRRQAGAAIVDNKRTVWASNLPEGTSAQKAELIALTQALRLAEGKSINIYTDSRYAFATAHVHGAIYKQRGLLTSAGKDIKNKEEILALLEAIHLPKRVAIIHCPGHQRGTDPVATGNRKADEAAKQAAQSTRILTETTKNAGKRTADGSEFEKRTADGSEFESPKKKAKVE

SEQ ID NO: 7714 - protein, 2128 aa, synthetic construct
MPAAKRVKLDGGDKKYSIGLDIGTNSVGWAVITDEYKVPSKKFKVLGNTDRHSIKKNLIGALLFDSGETAEATRLKRTARRRYTRRKNRICYLQEIFSNEMAKVDDSFFHRLEESFLVEEDKKHERHPIFGNIVDEVAYHEKYPTIYHLRKKLVDSTDKADLRLIYLALAHMIKFRGHFLIEGDLNPDNSDVDKLFIQLVQTYNQLFEENPINASGVDAKAILSARLSKSRRLENLIAQLPGEKKNGLFGNLIALSLGLTPNFKSNFDLAEDAKLQLSKDTYDDDLDNLLAQIGDQYADLFLAAKNLSDAILLSDILRVNTEITKAPLSASMIKRYDEHHQDLTLLKALVRQQLPEKYKEIFFDQSKNGYAGYIDGGASQEEFYKFIKPILEKMDGTEELLVKLNREDLLRKQRTFDNGSIPHQIHLGELHAILRRQEDFYPFLKDNREKIEKILTFRIPYYVGPLARGNSRFAWMTRKSEETITPWNFEEVVDKGASAQSFIERMTNFDKNLPNEKVLPKHSLLYEYFTVYNELTKVKYVTEGMRKPAFLSGEQKKAIVDLLFKTNRKVTVKQLKEDYFKKIECFDSVEISGVEDRFNASLGTYHDLLKIIKDKDFLDNEENEDILEDIVLTLTLFEDREMIEERLKTYAHLFDDKVMKQLKRRRYTGWGRLSRKLINGIRDKQSGKTILDFLKSDGFANRNFMQLIHDDSLTFKEDIQKAQVSGQGDSLHEHIANLAGSPAIKKGILQTVKVVDELVKVMGRHKPENIVIEMARENQTTQKGQKNSRERMKRIEEGIKELGSQILKEHPVENTQLQNEKLYLYYLQNGRDMYVDQELDINRLSDYDVDHIVPQSFLKDDSIDNKVLTRSDKARGKSDNVPSEEVVKKMKNYWRQLLNAKLITQRKFDNLTKAERGGLSELDKAGFIKRQLVETRQITKHVAQILDSRMNTKYDENDKLIREVKVITLKSKLVSDFRKDFQFYKVREINNYHHAHDAYLNAVVGTALIKKYPKLESEFVYGDYKVYDVRKMIAKSEQEIGKATAKYFFYSNIMNFFKTEITLANGEIRKRPLIETNGETGEIVWDKGRDFATVRKVLSMPQVNIVKKTEVQTGGFSKESILPKRNSDKLIARKKDWDPKKYGGFDSPTVAYSVLVVAKVEKGKSKKLKSVKELLGITIMERSSFEKNPIDFLEAKGYKEVKKDLIIKLPKYSLFELENGRKRMLASAGELQKGNELALPSKYVNFLYLASHYEKLKGSPEDNEQKQLFVEQHKHYLDEIIEQISEFSKRVILADANLDKVLSAYNKHRDKPIREQAENIIHLFTLTNLGAPAAFKYFDTTIDRKRYTSTKEVLDATLIHQSITGLYETRIDLSQLGGDGGGSAGSAAGSGEFGGLLGRDLLTKLKAQIQFSTEGPQVTWEDRPAMCLVLNLEEEYRLHEKPVPPSIDPSWLQLFPMVWAEKAGMGLANQVPPVVVELKSDASPVAVRQYPMSKEAREGIRPHIQRFLDLGILVPCQSPWNTPLLPVKKPGTNDYRPVQDLREVNKRVQDIHPTVPNPYNLLSSLPPSHTWYSVLDLKDAFFCLKLHPNSQPLFAFEWRDPEKGNTGQLTWTRLPQGFKNSPTLFNEALHRDLASFRALNPQVVMLQYVDDLLVAAPTYRDCKEGTRRLLQELSKLGYRVSAKKAQLCREEVTYLGYLLKGGKRWLTPARKATVMKIPTPTTPRQVREFLGTAGFCRLWIPGFASLAAPLYPLTRPKVPFTWTEAHQEAFGRIKEALLSAPALALPDLTKPFALYVDEKEGVARGVLTQTLGPWRRPVAYLSKKLDPVASGWPTCLKAIAAVALLLKDADKLTLGQNVLVIAPHNLESIVRQPPDRWMTNARMTHYQSLLLNERVSFAPPAILNPATLLPVESDDTPIHICSEILAEETGTRPDLRDQPLPGVPAWYTDGSSFIMDGRRQAGAAIVDNKRTVWASNLPEGTSAQKAELIALTQALRLAEGKSINIYTDSRYAFATAHVHGAIYKQRGWLTSAGKDIKNKEEILALLEAIHLPKRVAIIHCPGHQRGTDPVATGNRKADEAAKQAAQSTRILTETTKNAGKRTADGSEFEKRTADGSEFESPKKKAKVE

SEQ ID NO: 7715 - protein, 2219 aa, synthetic construct
MPAAKRVKLDGGDKKYSIGLDIGTNSVGWAVITDEYKVPSKKFKVLGNTDRHSIKKNLIGALLFDSGETAEATRLKRTARRRYTRRKNRICYLQEIFSNEMAKVDDSFFHRLEESFLVEEDKKHERHPIFGNIVDEVAYHEKYPTIYHLRKKLVDSTDKADLRLIYLALAHMIKFRGHFLIEGDLNPDNSDVDKLFIQLVQTYNQLFEENPINASGVDAKAILSARLSKSRRLENLIAQLPGEKKNGLFGNLIALSLGLTPNFKSNFDLAEDAKLQLSKDTYDDDLDNLLAQIGDQYADLFLAAKNLSDAILLSDILRVNTEITKAPLSASMIKRYDEHHQDLTLLKALVRQQLPEKYKEIFFDQSKNGYAGYIDGGASQEEFYKFIKPILEKMDGTEELLVKLNREDLLRKQRTFDNGSIPHQIHLGELHAILRRQEDFYPFLKDNREKIEKILTFRIPYYVGPLARGNSRFAWMTRKSEETITPWNFEEVVDKGASAQSFIERMTNFDKNLPNEKVLPKHSLLYEYFTVYNELTKVKYVTEGMRKPAFLSGEQKKAIVDLLFKTNRKVTVKQLKEDYFKKIECFDSVEISGVEDRFNASLGTYHDLLKIIKDKDFLDNEENEDILEDIVLTLTLFEDREMIEERLKTYAHLFDDKVMKQLKRRRYTGWGRLSRKLINGIRDKQSGKTILDFLKSDGFANRNFMQLIHDDSLTFKEDIQKAQVSGQGDSLHEHIANLAGSPAIKKGILQTVKVVDELVKVMGRHKPENIVIEMARENQTTQKGQKNSRERMKRIEEGIKELGSQILKEHPVENTQLQNEKLYLYYLQNGRDMYVDQELDINRLSDYDVDHIVPQSFLKDDSIDNKVLTRSDKARGKSDNVPSEEVVKKMKNYWRQLLNAKLITQRKFDNLTKAERGGLSELDKAGFIKRQLVETRQITKHVAQILDSRMNTKYDENDKLIREVKVITLKSKLVSDFRKDFQFYKVREINNYHHAHDAYLNAVVGTALIKKYPKLESEFVYGDYKVYDVRKMIAKSEQEIGKATAKYFFYSNIMNFFKTEITLANGEIRKRPLIETNGETGEIVWDKGRDFATVRKVLSMPQVNIVKKTEVQTGGFSKESILPKRNSDKLIARKKDWDPKKYGGFDSPTVAYSVLVVAKVEKGKSKKLKSVKELLGITIMERSSFEKNPIDFLEAKGYKEVKKDLIIKLPKYSLFELENGRKRMLASAGELQKGNELALPSKYVNFLYLASHYEKLKGSPEDNEQKQLFVEQHKHYLDEIIEQISEFSKRVILADANLDKVLSAYNKHRDKPIREQAENIIHLFTLTNLGAPAAFKYFDTTIDRKRYTSTKEVLDATLIHQSITGLYETRIDLSQLGGDGGGSAGSAAGSGEFGGTLGDQGSRGSDPLPEPRVTLTVEGIPTEFLVNTGAEHSVLTKPMGKMGSKRTVVAGATGSKVYPWTTKRLLKIGQKQVTHSFLVIPECPAPLLGRDLLTKLKAQIQFSTEGPQVTWEDRPAMCLVLNLEEEYRLHEKPVPPSIDPSWLQLFPMVWAEKAGMGLANQVPPVVVELKSDASPVAVRQYPMSKEAREGIRPHIQRFLDLGILVPCQSPWNTPLLPVKKPGTNDYRPVQDLREVNKRVQDIHPTVPNPYNLLSSLPPSHTWYSVLDLKDAFFCLKLHPNSQPLFAFEWRDPEKGNTGQLTWTRLPQGFKNSPTLFNEALHRDLASFRALNPQVVMLQYVDDLLVAAPTYRDCKEGTRRLLQELSKLGYRVSAKKAQLCREEVTYLGYLLKGGKRWLTPARKATVMKIPTPTTPRQVREFLGTAGFCRLWIPGFASLAAPLYPLTRPKVPFTWTEAHQEAFGRIKEALLSAPALALPDLTKPFALYVDEKEGVARGVLTQTLGPWRRPVAYLSKKLDPVASGWPTCLKAIAAVALLLKDADKLTLGQNVLVIAPHNLESIVRQPPDRWMTNARMTHYQSLLLNERVSFAPPAILNPATLLPVESDDTPIHICSEILAEETGTRPDLRDQPLPGVPAWYTDGSSFIMDGRRQAGAAIVDNKRTVWASNLPEGTSAQKAELIALTQALRLAEGKSINIYTDSRYAFATAHVHGAIYKQRGWLTSAGKDIKNKEEILALLEAIHLPKRVAIIHCPGHQRGTDPVATGNRKADEAAKQAAQSTRILTETTKNAGKRTADGSEFEKRTADGSEFESPKKKAKVE

SEQ ID NO: 7716 - protein, 2097 aa, synthetic construct
MPAAKRVKLDGGDKKYSIGLDIGTNSVGWAVITDEYKVPSKKFKVLGNTDRHSIKKNLIGALLFDSGETAEATRLKRTARRRYTRRKNRICYLQEIFSNEMAKVDDSFFHRLEESFLVEEDKKHERHPIFGNIVDEVAYHEKYPTIYHLRKKLVDSTDKADLRLIYLALAHMIKFRGHFLIEGDLNPDNSDVDKLFIQLVQTYNQLFEENPINASGVDAKAILSARLSKSRRLENLIAQLPGEKKNGLFGNLIALSLGLTPNFKSNFDLAEDAKLQLSKDTYDDDLDNLLAQIGDQYADLFLAAKNLSDAILLSDILRVNTEITKAPLSASMIKRYDEHHQDLTLLKALVRQQLPEKYKEIFFDQSKNGYAGYIDGGASQEEFYKFIKPILEKMDGTEELLVKLNREDLLRKQRTFDNGSIPHQIHLGELHAILRRQEDFYPFLKDNREKIEKILTFRIPYYVGPLARGNSRFAWMTRKSEETITPWNFEEVVDKGASAQSFIERMTNFDKNLPNEKVLPKHSLLYEYFTVYNELTKVKYVTEGMRKPAFLSGEQKKAIVDLLFKTNRKVTVKQLKEDYFKKIECFDSVEISGVEDRFNASLGTYHDLLKIIKDKDFLDNEENEDILEDIVLTLTLFEDREMIEERLKTYAHLFDDKVMKQLKRRRYTGWGRLSRKLINGIRDKQSGKTILDFLKSDGFANRNFMQLIHDDSLTFKEDIQKAQVSGQGDSLHEHIANLAGSPAIKKGILQTVKVVDELVKVMGRHKPENIVIEMARENQTTQKGQKNSRERMKRIEEGIKELGSQILKEHPVENTQLQNEKLYLYYLQNGRDMYVDQELDINRLSDYDVDHIVPQSFLKDDSIDNKVLTRSDKARGKSDNVPSEEVVKKMKNYWRQLLNAKLITQRKFDNLTKAERGGLSELDKAGFIKRQLVETRQITKHVAQILDSRMNTKYDENDKLIREVKVITLKSKLVSDFRKDFQFYKVREINNYHHAHDAYLNAVVGTALIKKYPKLESEFVYGDYKVYDVRKMIAKSEQEIGKATAKYFFYSNIMNFFKTEITLANGEIRKRPLIETNGETGEIVWDKGRDFATVRKVLSMPQVNIVKKTEVQTGGFSKESILPKRNSDKLIARKKDWDPKKYGGFDSPTVAYSVLVVAKVEKGKSKKLKSVKELLGITIMERSSFEKNPIDFLEAKGYKEVKKDLIIKLPKYSLFELENGRKRMLASAGELQKGNELALPSKYVNFLYLASHYEKLKGSPEDNEQKQLFVEQHKHYLDEIIEQISEFSKRVILADANLDKVLSAYNKHRDKPIREQAENIIHLFTLTNLGAPAAFKYFDTTIDRKRYTSTKEVLDATLIHQSITGLYETRIDLSQLGGDGGGSAGSAAGSGEFGGTLNLEDEYRLYETSAEPEVSPGSTWLSDFPQAWAETGGMGLAVRQAPLIIPLKATSTPVSIKQYPMSQEAKLGIKPHIQRLLDQGILVPCQSPWNTPLLPVKKPGTNDYRPVQDLREVNKRVEDIHPTVPNPYNLLSGLPPSHRWYTVLDLKDAFFCLRLHPTSQPLFAFEWRDPGMGISGQLTWTRLPQGFKNSPTLFNEALHRDLADFRIQHPDLILLQYVDDILLAATSELDCQQGTRALLLTLGNLGYRASAKKAQLCQKQVKYLGYLLKEGQRWLTEARKETVMGQPTPKTPRQLREFLGTAGFCRLWIPGFAEMAAPLYPLTKPGTLFNWGPDQQKAYQEIKQALLTAPALGLPDLTKPFELFVDEKQGYAKGVLTQKLGPWRRPVAYLSKKLDPVAAGWPPCLRMVAAIAVLRKDAGKLTMGQPLVILAPHAVEALVKQPPDRWLSNARMTHYQAMLLDTDRVQFGPVVALNPATLLPLPEEGAPHDCLEILAETHGTRPDLTDQPIPDADHTWYTDGSSFLQEGQRKAGAAVTTETEVIWARALPAGTSAQRAELIALTQALKMAEGKRLNVYTDSRYAFATAHIHGEIYRRRGWLTSEGREIKNKSEILALLKALFLPKRLSIIHCLGHQKGDSAEARGNRLADQAAREAAIKTPPDTSTLLAGKRTADGSEFEKRTADGSEFESPKKKAKVE

SEQ ID NO: 7717 - protein, 2097 aa, synthetic construct
MPAAKRVKLDGGDKKYSIGLDIGTNSVGWAVITDEYKVPSKKFKVLGNTDRHSIKKNLIGALLFDSGETAEATRLKRTARRRYTRRKNRICYLQEIFSNEMAKVDDSFFHRLEESFLVEEDKKHERHPIFGNIVDEVAYHEKYPTIYHLRKKLVDSTDKADLRLIYLALAHMIKFRGHFLIEGDLNPDNSDVDKLFIQLVQTYNQLFEENPINASGVDAKAILSARLSKSRRLENLIAQLPGEKKNGLFGNLIALSLGLTPNFKSNFDLAEDAKLQLSKDTYDDDLDNLLAQIGDQYADLFLAAKNLSDAILLSDILRVNTEITKAPLSASMIKRYDEHHQDLTLLKALVRQQLPEKYKEIFFDQSKNGYAGYIDGGASQEEFYKFIKPILEKMDGTEELLVKLNREDLLRKQRTFDNGSIPHQIHLGELHAILRRQEDFYPFLKDNREKIEKILTFRIPYYVGPLARGNSRFAWMTRKSEETITPWNFEEVVDKGASAQSFIERMTNFDKNLPNEKVLPKHSLLYEYFTVYNELTKVKYVTEGMRKPAFLSGEQKKAIVDLLFKTNRKVTVKQLKEDYFKKIECFDSVEISGVEDRFNASLGTYHDLLKIIKDKDFLDNEENEDILEDIVLTLTLFEDREMIEERLKTYAHLFDDKVMKQLKRRRYTGWGRLSRKLINGIRDKQSGKTILDFLKSDGFANRNFMQLIHDDSLTFKEDIQKAQVSGQGDSLHEHIANLAGSPAIKKGILQTVKVVDELVKVMGRHKPENIVIEMARENQTTQKGQKNSRERMKRIEEGIKELGSQILKEHPVENTQLQNEKLYLYYLQNGRDMYVDQELDINRLSDYDVDHIVPQSFLKDDSIDNKVLTRSDKARGKSDNVPSEEVVKKMKNYWRQLLNAKLITQRKFDNLTKAERGGLSELDKAGFIKRQLVETRQITKHVAQILDSRMNTKYDENDKLIREVKVITLKSKLVSDFRKDFQFYKVREINNYHHAHDAYLNAVVGTALIKKYPKLESEFVYGDYKVYDVRKMIAKSEQEIGKATAKYFFYSNIMNFFKTEITLANGEIRKRPLIETNGETGEIVWDKGRDFATVRKVLSMPQVNIVKKTEVQTGGFSKESILPKRNSDKLIARKKDWDPKKYGGFDSPTVAYSVLVVAKVEKGKSKKLKSVKELLGITIMERSSFEKNPIDFLEAKGYKEVKKDLIIKLPKYSLFELENGRKRMLASAGELQKGNELALPSKYVNFLYLASHYEKLKGSPEDNEQKQLFVEQHKHYLDEIIEQISEFSKRVILADANLDKVLSAYNKHRDKPIREQAENIIHLFTLTNLGAPAAFKYFDTTIDRKRYTSTKEVLDATLIHQSITGLYETRIDLSQLGGDGGGSAGSAAGSGEFGGTLNIEDEHRLHETSKEPDVSLGSTWLSDFPQAWAETGGMGLAVRQAPLIIPLKATSTPVSIKQYPMSQEARLGIKPHIQRLLDQGILVPCQSPWNTPLLPVKKPGTNDYRPVQDLREVNKRVEDIHPTVPNPYNLLSGLPPSHQWYTVLDLKDAFFCLRLHPTSQPLFAFEWRDPEMGISGQLTWTRLPQGFKNSPTLFDEALHRDLADFRIQHPDLILLQYVDDLLLAATSELDCQQGTRALLQTLGNLGYRASAKKAQICQKQVKYLGYLLKEGQRWLTEARKETVMGQPTPKTPRQLREFLGTAGFCRLWIPGFAEMAAPLYPLTKTGTLFNWGPDQQKAYQEIKQALLTAPALGLPDLTKPFELFVDEKQGYAKGVLTQKLGPWRRPVAYLSKKLDPVAAGWPPCLRMVAAIAVLTKDAGKLTMGQPLVILAPHAVEALVKQPPDRWLSNARMTHYQALLLDTDRVQFGPVVALNPATLLPLPEEGLQHNCLDILAEAHGTRPDLTDQPLPDADHTWYTDGSSLLQEGQRKAGAAVTTETEVIWAKALPAGTSAQRAELIALTQALKMAEGKKLNVYTDSRYAFATAHIHGEIYRRRGLLTSEGKEIKNKDEILALLKALFLPKRLSIIHCPGHQKGHSAEARGNRMADQAARKAAITETPDTSTLLAGKRTADGSEFEKRTADGSEFESPKKKAKVE

SEQ ID NO: 7718 - protein, 2177 aa, synthetic construct
MPAAKRVKLDGGDKKYSIGLDIGTNSVGWAVITDEYKVPSKKFKVLGNTDRHSIKKNLIGALLFDSGETAEATRLKRTARRRYTRRKNRICYLQEIFSNEMAKVDDSFFHRLEESFLVEEDKKHERHPIFGNIVDEVAYHEKYPTIYHLRKKLVDSTDKADLRLIYLALAHMIKFRGHFLIEGDLNPDNSDVDKLFIQLVQTYNQLFEENPINASGVDAKAILSARLSKSRRLENLIAQLPGEKKNGLFGNLIALSLGLTPNFKSNFDLAEDAKLQLSKDTYDDDLDNLLAQIGDQYADLFLAAKNLSDAILLSDILRVNTEITKAPLSASMIKRYDEHHQDLTLLKALVRQQLPEKYKEIFFDQSKNGYAGYIDGGASQEEFYKFIKPILEKMDGTEELLVKLNREDLLRKQRTFDNGSIPHQIHLGELHAILRRQEDFYPFLKDNREKIEKILTFRIPYYVGPLARGNSRFAWMTRKSEETITPWNFEEVVDKGASAQSFIERMTNFDKNLPNEKVLPKHSLLYEYFTVYNELTKVKYVTEGMRKPAFLSGEQKKAIVDLLFKTNRKVTVKQLKEDYFKKIECFDSVEISGVEDRFNASLGTYHDLLKIIKDKDFLDNEENEDILEDIVLTLTLFEDREMIEERLKTYAHLFDDKVMKQLKRRRYTGWGRLSRKLINGIRDKQSGKTILDFLKSDGFANRNFMQLIHDDSLTFKEDIQKAQVSGQGDSLHEHIANLAGSPAIKKGILQTVKVVDELVKVMGRHKPENIVIEMARENQTTQKGQKNSRERMKRIEEGIKELGSQILKEHPVENTQLQNEKLYLYYLQNGRDMYVDQELDINRLSDYDVDHIVPQSFLKDDSIDNKVLTRSDKARGKSDNVPSEEVVKKMKNYWRQLLNAKLITQRKFDNLTKAERGGLSELDKAGFIKRQLVETRQITKHVAQILDSRMNTKYDENDKLIREVKVITLKSKLVSDFRKDFQFYKVREINNYHHAHDAYLNAVVGTALIKKYPKLESEFVYGDYKVYDVRKMIAKSEQEIGKATAKYFFYSNIMNFFKTEITLANGEIRKRPLIETNGETGEIVWDKGRDFATVRKVLSMPQVNIVKKTEVQTGGFSKESILPKRNSDKLIARKKDWDPKKYGGFDSPTVAYSVLVVAKVEKGKSKKLKSVKELLGITIMERSSFEKNPIDFLEAKGYKEVKKDLIIKLPKYSLFELENGRKRMLASAGELQKGNELALPSKYVNFLYLASHYEKLKGSPEDNEQKQLFVEQHKHYLDEIIEQISEFSKRVILADANLDKVLSAYNKHRDKPIREQAENIIHLFTLTNLGAPAAFKYFDTTIDRKRYTSTKEVLDATLIHQSITGLYETRIDLSQLGGDGGGSAGSAAGSGEFGGMDPLQLLQPLEAEIKGTKLKAHWNSGATITCVPQAFLEEEVPIKNIWIKTIHGEKEQPVYYLTFKIQGRKVEAEVISSPYDYILVSPSDIPWLMKKPLQLTTLVPLQEYEERLLKQTMLTGSYKEKLQSLFLKYDALWQHWENQVGHRRIKPHHIATGTVNPRPQKQYPINPKAKASIQTVINDLLKQGVLIQQNSIMNTPVYPVPKPDGKWRMVLDYREVNKTIPLIAAQNQHSAGILSSIFRGKYKTTLDLSNGFWAHSITPESYWLTAFTWLGQQYCWTRLPQGFLNSPALFNADVVDLLKEVPNVQVYVDDIYISHDDPREHLEQLEKVFSLLLNAGYVVSLKKSEIAQHEVEFLGFNITKEGRGLTETFKQKLLNITPPRDLKQLQSILGLLNFARNFIPNFSELVKPLYNIIATAPGKYITWTTDNSQQLQNIISMLNSAENLEERNPEVRLIMKVNTSPSAGYIRFYNEFAKRPIMYLNYVYTKAEVKFTNTEKLLTTIHKGLIKALDLGMGQEILVYSPIVSMTKIQKTPLPERKALPIRWITWMSYLEDPRIQFHYDKTLPELQQVPTVTDDIIAKIKHPSEFSMVFYTDGSAIKHPNVNKSHNAGMGIAQVQFKPEFTVINTWSIPLGDHTAQLAEVAAVEFACKKALKIDGPVLIVTDSFYVAESVNKELPYWQSNGFFNNKKKPLKHVSKWKSIADCIQLKPDIIIIHEKGHQPTASTFHTEGNNLADKLATQGSYVVNAGKRTADGSEFEKRTADGSEFESPKKKAKVE

SEQ ID NO: 7719 - protein, 2097 aa, synthetic construct
MPAAKRVKLDGGDKKYSIGLDIGTNSVGWAVITDEYKVPSKKFKVLGNTDRHSIKKNLIGALLFDSGETAEATRLKRTARRRYTRRKNRICYLQEIFSNEMAKVDDSFFHRLEESFLVEEDKKHERHPIFGNIVDEVAYHEKYPTIYHLRKKLVDSTDKADLRLIYLALAHMIKFRGHFLIEGDLNPDNSDVDKLFIQLVQTYNQLFEENPINASGVDAKAILSARLSKSRRLENLIAQLPGEKKNGLFGNLIALSLGLTPNFKSNFDLAEDAKLQLSKDTYDDDLDNLLAQIGDQYADLFLAAKNLSDAILLSDILRVNTEITKAPLSASMIKRYDEHHQDLTLLKALVRQQLPEKYKEIFFDQSKNGYAGYIDGGASQEEFYKFIKPILEKMDGTEELLVKLNREDLLRKQRTFDNGSIPHQIHLGELHAILRRQEDFYPFLKDNREKIEKILTFRIPYYVGPLARGNSRFAWMTRKSEETITPWNFEEVVDKGASAQSFIERMTNFDKNLPNEKVLPKHSLLYEYFTVYNELTKVKYVTEGMRKPAFLSGEQKKAIVDLLFKTNRKVTVKQLKEDYFKKIECFDSVEISGVEDRFNASLGTYHDLLKIIKDKDFLDNEENEDILEDIVLTLTLFEDREMIEERLKTYAHLFDDKVMKQLKRRRYTGWGRLSRKLINGIRDKQSGKTILDFLKSDGFANRNFMQLIHDDSLTFKEDIQKAQVSGQGDSLHEHIANLAGSPAIKKGILQTVKVVDELVKVMGRHKPENIVIEMARENQTTQKGQKNSRERMKRIEEGIKELGSQILKEHPVENTQLQNEKLYLYYLQNGRDMYVDQELDINRLSDYDVDHIVPQSFLKDDSIDNKVLTRSDKARGKSDNVPSEEVVKKMKNYWRQLLNAKLITQRKFDNLTKAERGGLSELDKAGFIKRQLVETRQITKHVAQILDSRMNTKYDENDKLIREVKVITLKSKLVSDFRKDFQFYKVREINNYHHAHDAYLNAVVGTALIKKYPKLESEFVYGDYKVYDVRKMIAKSEQEIGKATAKYFFYSNIMNFFKTEITLANGEIRKRPLIETNGETGEIVWDKGRDFATVRKVLSMPQVNIVKKTEVQTGGFSKESILPKRNSDKLIARKKDWDPKKYGGFDSPTVAYSVLVVAKVEKGKSKKLKSVKELLGITIMERSSFEKNPIDFLEAKGYKEVKKDLIIKLPKYSLFELENGRKRMLASAGELQKGNELALPSKYVNFLYLASHYEKLKGSPEDNEQKQLFVEQHKHYLDEIIEQISEFSKRVILADANLDKVLSAYNKHRDKPIREQAENIIHLFTLTNLGAPAAFKYFDTTIDRKRYTSTKEVLDATLIHQSITGLYETRIDLSQLGGDGGGSAGSAAGSGEFGGTLNIEDEYRLHETSKEPDVPLGSTWLSDFPQAWAETGGMGLAVRQAPLIIPLKATSTPVSIKQYPMSQEARLGIKPHIQRLLDQGILVPCQSPWNTPLLPVKKPGTNDYRPVQDLREVNKRVEDIHPTVPNPYNLLSGLPPSHQWYTVLDLKDAFFCLRLHPTSQPLFAFEWRDPEMGISGQLTWTRLPQGFKNSPTLFNEALHRDLADFRIQHPDLILLQYVDDLLLAATSEQDCQRGTRALLQTLGNLGYRASAKKAQICQKQVKYLGYLLKEGQRWLTEARKETVMGQPTPKTPRQLREFLGTAGFCRLWIPGFAEMAAPLYPLTKPGTLFNWGPDQQKAYQEIKQALLTAPALGLPDLTKPFELFVDEKQGYAKGVLTQKLGPWRRPVAYLSKKLDPVAAGWPPCLRMVAAIAVLTKDAGKLTMGQPLVILAPHAVEALVKQPPDRWLSNARMTHYQAMLLDTDRVQFGPVVALNPATLLPLPEKEAPHDCLEILAETHGTRPDLTDQPIPDADYTWYTDGSSFLQEGQRRAGAAVTTETEVIWARALPAGTSAQRAELIALTQALKMAEGKKLNVYTDSRYAFATAHVHGEIYRRRGWLTSEGREIKNKNEILALLKALFLPKRLSIIHCPGHQKGNSAEARGNRMADQAAREAAMKAVLETSTLLAGKRTADGSEFEKRTADGSEFESPKKKAKVE

SEQ ID NO: 7720 - protein, 2120 aa, synthetic construct
MPAAKRVKLDGGDKKYSIGLDIGTNSVGWAVITDEYKVPSKKFKVLGNTDRHSIKKNLIGALLFDSGETAEATRLKRTARRRYTRRKNRICYLQEIFSNEMAKVDDSFFHRLEESFLVEEDKKHERHPIFGNIVDEVAYHEKYPTIYHLRKKLVDSTDKADLRLIYLALAHMIKFRGHFLIEGDLNPDNSDVDKLFIQLVQTYNQLFEENPINASGVDAKAILSARLSKSRRLENLIAQLPGEKKNGLFGNLIALSLGLTPNFKSNFDLAEDAKLQLSKDTYDDDLDNLLAQIGDQYADLFLAAKNLSDAILLSDILRVNTEITKAPLSASMIKRYDEHHQDLTLLKALVRQQLPEKYKEIFFDQSKNGYAGYIDGGASQEEFYKFIKPILEKMDGTEELLVKLNREDLLRKQRTFDNGSIPHQIHLGELHAILRRQEDFYPFLKDNREKIEKILTFRIPYYVGPLARGNSRFAWMTRKSEETITPWNFEEVVDKGASAQSFIERMTNFDKNLPNEKVLPKHSLLYEYFTVYNELTKVKYVTEGMRKPAFLSGEQKKAIVDLLFKTNRKVTVKQLKEDYFKKIECFDSVEISGVEDRFNASLGTYHDLLKIIKDKDFLDNEENEDILEDIVLTLTLFEDREMIEERLKTYAHLFDDKVMKQLKRRRYTGWGRLSRKLINGIRDKQSGKTILDFLKSDGFANRNFMQLIHDDSLTFKEDIQKAQVSGQGDSLHEHIANLAGSPAIKKGILQTVKVVDELVKVMGRHKPENIVIEMARENQTTQKGQKNSRERMKRIEEGIKELGSQILKEHPVENTQLQNEKLYLYYLQNGRDMYVDQELDINRLSDYDVDHIVPQSFLKDDSIDNKVLTRSDKARGKSDNVPSEEVVKKMKNYWRQLLNAKLITQRKFDNLTKAERGGLSELDKAGFIKRQLVETRQITKHVAQILDSRMNTKYDENDKLIREVKVITLKSKLVSDFRKDFQFYKVREINNYHHAHDAYLNAVVGTALIKKYPKLESEFVYGDYKVYDVRKMIAKSEQEIGKATAKYFFYSNIMNFFKTEITLANGEIRKRPLIETNGETGEIVWDKGRDFATVRKVLSMPQVNIVKKTEVQTGGFSKESILPKRNSDKLIARKKDWDPKKYGGFDSPTVAYSVLVVAKVEKGKSKKLKSVKELLGITIMERSSFEKNPIDFLEAKGYKEVKKDLIIKLPKYSLFELENGRKRMLASAGELQKGNELALPSKYVNFLYLASHYEKLKGSPEDNEQKQLFVEQHKHYLDEIIEQISEFSKRVILADANLDKVLSAYNKHRDKPIREQAENIIHLFTLTNLGAPAAFKYFDTTIDRKRYTSTKEVLDATLIHQSITGLYETRIDLSQLGGDGGSGGSSGGSSGSETPGTSESATPESSGGSSGGSSGGTAPLEEEYRLFLEAPIQNVTLLEQWKREIPKVWAEINPPGLASTQAPIHVQLLSTALPVRVRQYPITLEAKRSLRETIRKFRAAGILRPVHSPWNTPLLPVRKSGTSEYRMVQDLREVNKRVETIHPTVPNPYTLLSLLPPDRIWYSVLDLKDAFFCIPLAPESQLIFAFEWADAEEGESGQLTWTRLPQGFKNSPTLFDEALNRDLQGFRLDHPSVSLLQYVDDLLIAADTQAACLSATRDLLMTLAELGYRVSGKKAQLCQEEVTYLGFKIHKGSRSLSNSRTQAILQIPVPKTKRQVREFLGTIGYCRLWIPGFAELAQPLYAATRGGNDPLVWGEKEEEAFQSLKLALTQPPALALPSLDKPFQLFVEETSGAAKGVLTQALGPWKRPVAYLSKRLDPVAAGWPRCLRAIAAAALLTREASKLTFGQDIEITSSHNLESLLRSPPDKWLTNARITQYQVLLLDPPRVRFKQTAALNPATLLPETDDTLPIHHCLDTLDSLTSTRPDLTDQPLAQAEATLFTDGSSYIRDGKRYAGAAVVTLDSVIWAEPLPIGTSAQKAELIALTKALEWSKDKSVNIYTDSRYAFATLHVHGMIYRERGLLTAGGKAIKNAPEILALLTAVWLPKRVAVMHCKGHQKDDAPTSTGNRRADEVAREVAIRPLSTQATISAGKRTADGSEFEKRTADGSEFESPKKKAKVE

SEQ ID NO: 7721 - protein, 2120 aa, synthetic construct
MPAAKRVKLDGGDKKYSIGLDIGTNSVGWAVITDEYKVPSKKFKVLGNTDRHSIKKNLIGALLFDSGETAEATRLKRTARRRYTRRKNRICYLQEIFSNEMAKVDDSFFHRLEESFLVEEDKKHERHPIFGNIVDEVAYHEKYPTIYHLRKKLVDSTDKADLRLIYLALAHMIKFRGHFLIEGDLNPDNSDVDKLFIQLVQTYNQLFEENPINASGVDAKAILSARLSKSRRLENLIAQLPGEKKNGLFGNLIALSLGLTPNFKSNFDLAEDAKLQLSKDTYDDDLDNLLAQIGDQYADLFLAAKNLSDAILLSDILRVNTEITKAPLSASMIKRYDEHHQDLTLLKALVRQQLPEKYKEIFFDQSKNGYAGYIDGGASQEEFYKFIKPILEKMDGTEELLVKLNREDLLRKQRTFDNGSIPHQIHLGELHAILRRQEDFYPFLKDNREKIEKILTFRIPYYVGPLARGNSRFAWMTRKSEETITPWNFEEVVDKGASAQSFIERMTNFDKNLPNEKVLPKHSLLYEYFTVYNELTKVKYVTEGMRKPAFLSGEQKKAIVDLLFKTNRKVTVKQLKEDYFKKIECFDSVEISGVEDRFNASLGTYHDLLKIIKDKDFLDNEENEDILEDIVLTLTLFEDREMIEERLKTYAHLFDDKVMKQLKRRRYTGWGRLSRKLINGIRDKQSGKTILDFLKSDGFANRNFMQLIHDDSLTFKEDIQKAQVSGQGDSLHEHIANLAGSPAIKKGILQTVKVVDELVKVMGRHKPENIVIEMARENQTTQKGQKNSRERMKRIEEGIKELGSQILKEHPVENTQLQNEKLYLYYLQNGRDMYVDQELDINRLSDYDVDHIVPQSFLKDDSIDNKVLTRSDKARGKSDNVPSEEVVKKMKNYWRQLLNAKLITQRKFDNLTKAERGGLSELDKAGFIKRQLVETRQITKHVAQILDSRMNTKYDENDKLIREVKVITLKSKLVSDFRKDFQFYKVREINNYHHAHDAYLNAVVGTALIKKYPKLESEFVYGDYKVYDVRKMIAKSEQEIGKATAKYFFYSNIMNFFKTEITLANGEIRKRPLIETNGETGEIVWDKGRDFATVRKVLSMPQVNIVKKTEVQTGGFSKESILPKRNSDKLIARKKDWDPKKYGGFDSPTVAYSVLVVAKVEKGKSKKLKSVKELLGITIMERSSFEKNPIDFLEAKGYKEVKKDLIIKLPKYSLFELENGRKRMLASAGELQKGNELALPSKYVNFLYLASHYEKLKGSPEDNEQKQLFVEQHKHYLDEIIEQISEFSKRVILADANLDKVLSAYNKHRDKPIREQAENIIHLFTLTNLGAPAAFKYFDTTIDRKRYTSTKEVLDATLIHQSITGLYETRIDLSQLGGDGGSGGSSGGSSGSETPGTSESATPESSGGSSGGSSGGTAPLEEEYRLFLEAPIQNVTLLEQWKREIPKVWAEINPPGLASTQAPIHVQLLSTALPVRVRQYPITLEAKRSLRETIRKFRAAGILRPVHSPWNTPLLPVRKSGTSEYRMVQDLREVNKRVETIHPTVPNPYTLLSLLPPDRIWYSVLDLKDAFFCIPLAPESQLIFAFEWADAEEGESGQLTWTRLPQGFKNSPTLFNEALNRDLQGFRLDHPSVSLLQYVDDLLIAADTQAACLSATRDLLMTLAELGYRVSGKKAQLCQEEVTYLGFKIHKGSRSLSNSRTQAILQIPVPKTKRQVREFLGTIGYCRLWIPGFAELAQPLYAATRPGNDPLVWGEKEEEAFQSLKLALTQPPALALPSLDKPFQLFVEETSGAAKGVLTQALGPWKRPVAYLSKRLDPVAAGWPRCLRAIAAAALLTREASKLTFGQDIEITSSHNLESLLRSPPDKWLTNARITQYQVLLLDPPRVRFKQTAALNPATLLPETDDTLPIHHCLDTLDSLTSTRPDLTDQPLAQAEATLFTDGSSYIRDGKRYAGAAVVTLDSVIWAEPLPIGTSAQKAELIALTKALEWSKDKSVNIYTDSRYAFATLHVHGMIYRERGWLTAGGKAIKNAPEILALLTAVWLPKRVAVMHCKGHQKDDAPTSTGNRRADEVAREVAIRPLSTQATISAGKRTADGSEFEKRTADGSEFESPKKKAKVE

SEQ ID NO: 7722 - protein, 2124 aa, synthetic construct
MPAAKRVKLDGGDKKYSIGLDIGTNSVGWAVITDEYKVPSKKFKVLGNTDRHSIKKNLIGALLFDSGETAEATRLKRTARRRYTRRKNRICYLQEIFSNEMAKVDDSFFHRLEESFLVEEDKKHERHPIFGNIVDEVAYHEKYPTIYHLRKKLVDSTDKADLRLIYLALAHMIKFRGHFLIEGDLNPDNSDVDKLFIQLVQTYNQLFEENPINASGVDAKAILSARLSKSRRLENLIAQLPGEKKNGLFGNLIALSLGLTPNFKSNFDLAEDAKLQLSKDTYDDDLDNLLAQIGDQYADLFLAAKNLSDAILLSDILRVNTEITKAPLSASMIKRYDEHHQDLTLLKALVRQQLPEKYKEIFFDQSKNGYAGYIDGGASQEEFYKFIKPILEKMDGTEELLVKLNREDLLRKQRTFDNGSIPHQIHLGELHAILRRQEDFYPFLKDNREKIEKILTFRIPYYVGPLARGNSRFAWMTRKSEETITPWNFEEVVDKGASAQSFIERMTNFDKNLPNEKVLPKHSLLYEYFTVYNELTKVKYVTEGMRKPAFLSGEQKKAIVDLLFKTNRKVTVKQLKEDYFKKIECFDSVEISGVEDRFNASLGTYHDLLKIIKDKDFLDNEENEDILEDIVLTLTLFEDREMIEERLKTYAHLFDDKVMKQLKRRRYTGWGRLSRKLINGIRDKQSGKTILDFLKSDGFANRNFMQLIHDDSLTFKEDIQKAQVSGQGDSLHEHIANLAGSPAIKKGILQTVKVVDELVKVMGRHKPENIVIEMARENQTTQKGQKNSRERMKRIEEGIKELGSQILKEHPVENTQLQNEKLYLYYLQNGRDMYVDQELDINRLSDYDVDHIVPQSFLKDDSIDNKVLTRSDKARGKSDNVPSEEVVKKMKNYWRQLLNAKLITQRKFDNLTKAERGGLSELDKAGFIKRQLVETRQITKHVAQILDSRMNTKYDENDKLIREVKVITLKSKLVSDFRKDFQFYKVREINNYHHAHDAYLNAVVGTALIKKYPKLESEFVYGDYKVYDVRKMIAKSEQEIGKATAKYFFYSNIMNFFKTEITLANGEIRKRPLIETNGETGEIVWDKGRDFATVRKVLSMPQVNIVKKTEVQTGGFSKESILPKRNSDKLIARKKDWDPKKYGGFDSPTVAYSVLVVAKVEKGKSKKLKSVKELLGITIMERSSFEKNPIDFLEAKGYKEVKKDLIIKLPKYSLFELENGRKRMLASAGELQKGNELALPSKYVNFLYLASHYEKLKGSPEDNEQKQLFVEQHKHYLDEIIEQISEFSKRVILADANLDKVLSAYNKHRDKPIREQAENIIHLFTLTNLGAPAAFKYFDTTIDRKRYTSTKEVLDATLIHQSITGLYETRIDLSQLGGDGGSGGSSGGSSGSETPGTSESATPESSGGSSGGSSGGTVSLQDEHRLFDIPVTTSLPDVWLQDFPQAWAETGGLGRAKCQAPIIIDLKPTAVPVSIKQYPMSLEAHMGIRQHIIKFLELGVLRPCRSPWNTPLLPVKKPGTQDYRPVQDLREINKRTVDIHPTVPNPYNLLSTLKPDYSWYTVLDLKDAFFCLPLAPQSQELFAFEWKDPERGISGQLTWTRLPQGFKNSPTLFDEALHRDLTDFRTQHPEVTLLQYVDDLLLAAPTKKACTQGTRHLLQELGEKGYRASAKKAQICQTKVTYLGYILSEGKRWLTPGRIETVARIPPPRNPREVREFLGTAGFCRLWIPGFAELAAPLYALTKESTPFTWQTEHQLAFEALKKALLSAPALGLPDTSKPFTLFLDERQGIAKGVLTQKLGPWKRPVAYLSKKLDPVAAGWPPCLRIMAATAMLVKDSAKLTLGQPLTVITPHTLEAIVRQPPDRWITNARLTHYQALLLDTDRVQFGPPVTLNPATLLPVPENQPSPHDCRQVLAETHGTREDLKDQELPDADHTWYTDGSSYLDSGTRRAGAAVVDGHNTIWAQSLPPGTSAQKAELIALTKALELSKGKKANIYTDSRYAFATAHTHGSIYERRGLLTSEGKEIKNKAEIIALLKALFLPQEVAIIHCPGHQKGQDPVAVGNRQADRVARQAAMAEVLTLATEPDNTSHITAGKRTADGSEFEKRTADGSEFESPKKKAKVE

SEQ ID NO: 7723 - protein, 2124 aa, synthetic construct
MPAAKRVKLDGGDKKYSIGLDIGTNSVGWAVITDEYKVPSKKFKVLGNTDRHSIKKNLIGALLFDSGETAEATRLKRTARRRYTRRKNRICYLQEIFSNEMAKVDDSFFHRLEESFLVEEDKKHERHPIFGNIVDEVAYHEKYPTIYHLRKKLVDSTDKADLRLIYLALAHMIKFRGHFLIEGDLNPDNSDVDKLFIQLVQTYNQLFEENPINASGVDAKAILSARLSKSRRLENLIAQLPGEKKNGLFGNLIALSLGLTPNFKSNFDLAEDAKLQLSKDTYDDDLDNLLAQIGDQYADLFLAAKNLSDAILLSDILRVNTEITKAPLSASMIKRYDEHHQDLTLLKALVRQQLPEKYKEIFFDQSKNGYAGYIDGGASQEEFYKFIKPILEKMDGTEELLVKLNREDLLRKQRTFDNGSIPHQIHLGELHAILRRQEDFYPFLKDNREKIEKILTFRIPYYVGPLARGNSRFAWMTRKSEETITPWNFEEVVDKGASAQSFIERMTNFDKNLPNEKVLPKHSLLYEYFTVYNELTKVKYVTEGMRKPAFLSGEQKKAIVDLLFKTNRKVTVKQLKEDYFKKIECFDSVEISGVEDRFNASLGTYHDLLKIIKDKDFLDNEENEDILEDIVLTLTLFEDREMIEERLKTYAHLFDDKVMKQLKRRRYTGWGRLSRKLINGIRDKQSGKTILDFLKSDGFANRNFMQLIHDDSLTFKEDIQKAQVSGQGDSLHEHIANLAGSPAIKKGILQTVKVVDELVKVMGRHKPENIVIEMARENQTTQKGQKNSRERMKRIEEGIKELGSQILKEHPVENTQLQNEKLYLYYLQNGRDMYVDQELDINRLSDYDVDHIVPQSFLKDDSIDNKVLTRSDKARGKSDNVPSEEVVKKMKNYWRQLLNAKLITQRKFDNLTKAERGGLSELDKAGFIKRQLVETRQITKHVAQILDSRMNTKYDENDKLIREVKVITLKSKLVSDFRKDFQFYKVREINNYHHAHDAYLNAVVGTALIKKYPKLESEFVYGDYKVYDVRKMIAKSEQEIGKATAKYFFYSNIMNFFKTEITLANGEIRKRPLIETNGETGEIVWDKGRDFATVRKVLSMPQVNIVKKTEVQTGGFSKESILPKRNSDKLIARKKDWDPKKYGGFDSPTVAYSVLVVAKVEKGKSKKLKSVKELLGITIMERSSFEKNPIDFLEAKGYKEVKKDLIIKLPKYSLFELENGRKRMLASAGELQKGNELALPSKYVNFLYLASHYEKLKGSPEDNEQKQLFVEQHKHYLDEIIEQISEFSKRVILADANLDKVLSAYNKHRDKPIREQAENIIHLFTLTNLGAPAAFKYFDTTIDRKRYTSTKEVLDATLIHQSITGLYETRIDLSQLGGDGGSGGSSGGSSGSETPGTSESATPESSGGSSGGSSGGTVSLQDEHRLFDIPVTTSLPDVWLQDFPQAWAETGGLGRAKCQAPIIIDLKPTAVPVSIKQYPMSLEAHMGIRQHIIKFLELGVLRPCRSPWNTPLLPVKKPGTQDYRPVQDLREINKRTVDIHPTVPNPYNLLSTLKPDYSWYTVLDLKDAFFCLPLAPQSQELFAFEWKDPERGISGQLTWTRLPQGFKNSPTLFNEALHRDLTDFRTQHPEVTLLQYVDDLLLAAPTKKACTQGTRHLLQELGEKGYRASAKKAQICQTKVTYLGYILSEGKRWLTPGRIETVARIPPPRNPREVREFLGTAGFCRLWIPGFAELAAPLYALTKPSTPFTWQTEHQLAFEALKKALLSAPALGLPDTSKPFTLFLDERQGIAKGVLTQKLGPWKRPVAYLSKKLDPVAAGWPPCLRIMAATAMLVKDSAKLTLGQPLTVITPHTLEAIVRQPPDRWITNARLTHYQALLLDTDRVQFGPPVTLNPATLLPVPENQPSPHDCRQVLAETHGTREDLKDQELPDADHTWYTDGSSYLDSGTRRAGAAVVDGHNTIWAQSLPPGTSAQKAELIALTKALELSKGKKANIYTDSRYAFATAHTHGSIYERRGWLTSEGKEIKNKAEIIALLKALFLPQEVAIIHCPGHQKGQDPVAVGNRQADRVARQAAMAEVLTLATEPDNTSHITAGKRTADGSEFEKRTADGSEFESPKKKAKVE

SEQ ID NO: 7724 - protein, 2109 aa, synthetic construct
MPAAKRVKLDGGDKKYSIGLDIGTNSVGWAVITDEYKVPSKKFKVLGNTDRHSIKKNLIGALLFDSGETAEATRLKRTARRRYTRRKNRICYLQEIFSNEMAKVDDSFFHRLEESFLVEEDKKHERHPIFGNIVDEVAYHEKYPTIYHLRKKLVDSTDKADLRLIYLALAHMIKFRGHFLIEGDLNPDNSDVDKLFIQLVQTYNQLFEENPINASGVDAKAILSARLSKSRRLENLIAQLPGEKKNGLFGNLIALSLGLTPNFKSNFDLAEDAKLQLSKDTYDDDLDNLLAQIGDQYADLFLAAKNLSDAILLSDILRVNTEITKAPLSASMIKRYDEHHQDLTLLKALVRQQLPEKYKEIFFDQSKNGYAGYIDGGASQEEFYKFIKPILEKMDGTEELLVKLNREDLLRKQRTFDNGSIPHQIHLGELHAILRRQEDFYPFLKDNREKIEKILTFRIPYYVGPLARGNSRFAWMTRKSEETITPWNFEEVVDKGASAQSFIERMTNFDKNLPNEKVLPKHSLLYEYFTVYNELTKVKYVTEGMRKPAFLSGEQKKAIVDLLFKTNRKVTVKQLKEDYFKKIECFDSVEISGVEDRFNASLGTYHDLLKIIKDKDFLDNEENEDILEDIVLTLTLFEDREMIEERLKTYAHLFDDKVMKQLKRRRYTGWGRLSRKLINGIRDKQSGKTILDFLKSDGFANRNFMQLIHDDSLTFKEDIQKAQVSGQGDSLHEHIANLAGSPAIKKGILQTVKVVDELVKVMGRHKPENIVIEMARENQTTQKGQKNSRERMKRIEEGIKELGSQILKEHPVENTQLQNEKLYLYYLQNGRDMYVDQELDINRLSDYDVDHIVPQSFLKDDSIDNKVLTRSDKARGKSDNVPSEEVVKKMKNYWRQLLNAKLITQRKFDNLTKAERGGLSELDKAGFIKRQLVETRQITKHVAQILDSRMNTKYDENDKLIREVKVITLKSKLVSDFRKDFQFYKVREINNYHHAHDAYLNAVVGTALIKKYPKLESEFVYGDYKVYDVRKMIAKSEQEIGKATAKYFFYSNIMNFFKTEITLANGEIRKRPLIETNGETGEIVWDKGRDFATVRKVLSMPQVNIVKKTEVQTGGFSKESILPKRNSDKLIARKKDWDPKKYGGFDSPTVAYSVLVVAKVEKGKSKKLKSVKELLGITIMERSSFEKNPIDFLEAKGYKEVKKDLIIKLPKYSLFELENGRKRMLASAGELQKGNELALPSKYVNFLYLASHYEKLKGSPEDNEQKQLFVEQHKHYLDEIIEQISEFSKRVILADANLDKVLSAYNKHRDKPIREQAENIIHLFTLTNLGAPAAFKYFDTTIDRKRYTSTKEVLDATLIHQSITGLYETRIDLSQLGGDGGSGGSSGGSSGSETPGTSESATPESSGGSSGGSSGGVPWILKKPLELTIKLDLEEQQGTLLNNSILSKKGKEELKQLFEKYSALWQSWENQVGHRRIRPHKIATGTVKPTPQKQYHINPKAKPDIQIVINDLLKQGVLIQKESTMNTPVYPVPKPNGRWRMVLDYRAVNKVTPLIAVQNQHSYGILGSLFKGRYKTTIDLSNGFWAHPIVPEDYWITAFTWQGKQYCWTVLPQGFLNSPGLFTGDVVDLLQGIPNVEVYVDDVYISHDSEKEHLEYLDILFNRLKEAGYIISLKKSNIANSIVDFLGFQITNEGRGLTDTFKEKLENITAPTTLKQLQSILGLLNFARNFIPDFTELIAPLYALIPKSTKNYVPWQIEHSTTLETLITKLNGAEYLQGRKGDKTLIMKVNASYTTGYIRYYNEGEKKPISYVSIVFSKTELKFTELEKLLTTVHKGLLKALDLSMGQNIHVYSPIVSMQNIQKTPQTAKKALASRWLSWLSYLEDPRIRFFYDPQMPALKDLPAVDTGKDNKKHPSNFQHIFYTDGSAITSPTKEGHLNAGMGIVYFINKDGNLQKQQEWSISLGNHTAQFAEIAAFEFALKKCLPLGGNILVVTDSNYVAKAYNEELDVWASNGFVNNRKKPLKHISKWKSVADLKRLRPDVVVTHEPGHQKLDSSPHAYGNNLADQLATQASFKVHAGKRTADGSEFEKRTADGSEFESPKKKAKVE

SEQ ID NO: 7725 - protein, 2109 aa, synthetic construct
MPAAKRVKLDGGDKKYSIGLDIGTNSVGWAVITDEYKVPSKKFKVLGNTDRHSIKKNLIGALLFDSGETAEATRLKRTARRRYTRRKNRICYLQEIFSNEMAKVDDSFFHRLEESFLVEEDKKHERHPIFGNIVDEVAYHEKYPTIYHLRKKLVDSTDKADLRLIYLALAHMIKFRGHFLIEGDLNPDNSDVDKLFIQLVQTYNQLFEENPINASGVDAKAILSARLSKSRRLENLIAQLPGEKKNGLFGNLIALSLGLTPNFKSNFDLAEDAKLQLSKDTYDDDLDNLLAQIGDQYADLFLAAKNLSDAILLSDILRVNTEITKAPLSASMIKRYDEHHQDLTLLKALVRQQLPEKYKEIFFDQSKNGYAGYIDGGASQEEFYKFIKPILEKMDGTEELLVKLNREDLLRKQRTFDNGSIPHQIHLGELHAILRRQEDFYPFLKDNREKIEKILTFRIPYYVGPLARGNSRFAWMTRKSEETITPWNFEEVVDKGASAQSFIERMTNFDKNLPNEKVLPKHSLLYEYFTVYNELTKVKYVTEGMRKPAFLSGEQKKAIVDLLFKTNRKVTVKQLKEDYFKKIECFDSVEISGVEDRFNASLGTYHDLLKIIKDKDFLDNEENEDILEDIVLTLTLFEDREMIEERLKTYAHLFDDKVMKQLKRRRYTGWGRLSRKLINGIRDKQSGKTILDFLKSDGFANRNFMQLIHDDSLTFKEDIQKAQVSGQGDSLHEHIANLAGSPAIKKGILQTVKVVDELVKVMGRHKPENIVIEMARENQTTQKGQKNSRERMKRIEEGIKELGSQILKEHPVENTQLQNEKLYLYYLQNGRDMYVDQELDINRLSDYDVDHIVPQSFLKDDSIDNKVLTRSDKARGKSDNVPSEEVVKKMKNYWRQLLNAKLITQRKFDNLTKAERGGLSELDKAGFIKRQLVETRQITKHVAQILDSRMNTKYDENDKLIREVKVITLKSKLVSDFRKDFQFYKVREINNYHHAHDAYLNAVVGTALIKKYPKLESEFVYGDYKVYDVRKMIAKSEQEIGKATAKYFFYSNIMNFFKTEITLANGEIRKRPLIETNGETGEIVWDKGRDFATVRKVLSMPQVNIVKKTEVQTGGFSKESILPKRNSDKLIARKKDWDPKKYGGFDSPTVAYSVLVVAKVEKGKSKKLKSVKELLGITIMERSSFEKNPIDFLEAKGYKEVKKDLIIKLPKYSLFELENGRKRMLASAGELQKGNELALPSKYVNFLYLASHYEKLKGSPEDNEQKQLFVEQHKHYLDEIIEQISEFSKRVILADANLDKVLSAYNKHRDKPIREQAENIIHLFTLTNLGAPAAFKYFDTTIDRKRYTSTKEVLDATLIHQSITGLYETRIDLSQLGGDGGSGGSSGGSSGSETPGTSESATPESSGGSSGGSSGGVPWLTQQPLQLTILVPLQEYQEKILSKTALPEDQKQQLKTLFVKYDNLWQHWENQVGHRKIRPHNIATGDYPPRPQKQYPINPKAKPSIQIVIDDLLKQGVLTPQNSTMNTPVYPVPKPDGRWRMVLDYREVNKTIPLTAAQNQHSAGILATIVRQKYKTTLDLANGFWAHPITPESYWLTAFTWQGKQYCWTRLPQGFLNSPALFNADVVDLLKEIPNVQVYVDDIYLSHDDPKEHVQQLEKVFQILLQAGYVVSLKKSEIGQKTVEFLGFNITKEGRGLTDTFKTKLLNITPPKDLKQLQSILGLLNFARNFIPNFAELVQPLYNLIAPAKGKYIEWSEENTKQLNMVIEALNTASNLEERLPEQRLVIKVNTSPSAGYVRYYNETGKKPIMYLNYVFSKAELKFSMLEKLLTTMHKALIKAMDLAMGQEILVYSPIVSMTKIQKTPLPERKALPIRWITWMTYLEDPRIQFHYDKTLPELKHIPDVYTSSQSPVKHPSQYEGVFYTDGSAIKSPDPTKSNNAGMGIVHATYKPEYQVLNQWSIPLGNHTAQMAEIAAVEFACKKALKIPGPVLVITDSFYVAESANKELPYWKSNGFVNNKKKPLKHISKWKSIAECLSMKPDITIQHEKGISLQIPVFILKGNALADKLATQGSYVVNAGKRTADGSEFEKRTADGSEFESPKKKAKVE

SEQ ID NO: 7726 - protein, 2198 aa, synthetic construct
MPAAKRVKLDGGDKKYSIGLDIGTNSVGWAVITDEYKVPSKKFKVLGNTDRHSIKKNLIGALLFDSGETAEATRLKRTARRRYTRRKNRICYLQEIFSNEMAKVDDSFFHRLEESFLVEEDKKHERHPIFGNIVDEVAYHEKYPTIYHLRKKLVDSTDKADLRLIYLALAHMIKFRGHFLIEGDLNPDNSDVDKLFIQLVQTYNQLFEENPINASGVDAKAILSARLSKSRRLENLIAQLPGEKKNGLFGNLIALSLGLTPNFKSNFDLAEDAKLQLSKDTYDDDLDNLLAQIGDQYADLFLAAKNLSDAILLSDILRVNTEITKAPLSASMIKRYDEHHQDLTLLKALVRQQLPEKYKEIFFDQSKNGYAGYIDGGASQEEFYKFIKPILEKMDGTEELLVKLNREDLLRKQRTFDNGSIPHQIHLGELHAILRRQEDFYPFLKDNREKIEKILTFRIPYYVGPLARGNSRFAWMTRKSEETITPWNFEEVVDKGASAQSFIERMTNFDKNLPNEKVLPKHSLLYEYFTVYNELTKVKYVTEGMRKPAFLSGEQKKAIVDLLFKTNRKVTVKQLKEDYFKKIECFDSVEISGVEDRFNASLGTYHDLLKIIKDKDFLDNEENEDILEDIVLTLTLFEDREMIEERLKTYAHLFDDKVMKQLKRRRYTGWGRLSRKLINGIRDKQSGKTILDFLKSDGFANRNFMQLIHDDSLTFKEDIQKAQVSGQGDSLHEHIANLAGSPAIKKGILQTVKVVDELVKVMGRHKPENIVIEMARENQTTQKGQKNSRERMKRIEEGIKELGSQILKEHPVENTQLQNEKLYLYYLQNGRDMYVDQELDINRLSDYDVDHIVPQSFLKDDSIDNKVLTRSDKARGKSDNVPSEEVVKKMKNYWRQLLNAKLITQRKFDNLTKAERGGLSELDKAGFIKRQLVETRQITKHVAQILDSRMNTKYDENDKLIREVKVITLKSKLVSDFRKDFQFYKVREINNYHHAHDAYLNAVVGTALIKKYPKLESEFVYGDYKVYDVRKMIAKSEQEIGKATAKYFFYSNIMNFFKTEITLANGEIRKRPLIETNGETGEIVWDKGRDFATVRKVLSMPQVNIVKKTEVQTGGFSKESILPKRNSDKLIARKKDWDPKKYGGFDSPTVAYSVLVVAKVEKGKSKKLKSVKELLGITIMERSSFEKNPIDFLEAKGYKEVKKDLIIKLPKYSLFELENGRKRMLASAGELQKGNELALPSKYVNFLYLASHYEKLKGSPEDNEQKQLFVEQHKHYLDEIIEQISEFSKRVILADANLDKVLSAYNKHRDKPIREQAENIIHLFTLTNLGAPAAFKYFDTTIDRKRYTSTKEVLDATLIHQSITGLYETRIDLSQLGGDGGSGGSSGGSSGSETPGTSESATPESSGGSSGGSSGGMNPLQLLQPLPAEIKGTKLLAHWNSGATITCIPESFLEDEQPIKKTLIKTIHGEKQQNVYYVTFKVKGRKVEAEVIASPYEYILLSPTDVPWLTQQPLQLTILVPLQEYQEKILSKTALPEDQKQQLKTLFVKYDNLWQHWENQVGHRKIRPHNIATGDYPPRPQKQYPINPKAKPSIQIVIDDLLKQGVLTPQNSTMNTPVYPVPKPDGRWRMVLDYREVNKTIPLTAAQNQHSAGILATIVRQKYKTTLDLANGFWAHPITPESYWLTAFTWQGKQYCWTRLPQGFLNSPALFNADVVDLLKEIPNVQVYVDDIYLSHDDPKEHVQQLEKVFQILLQAGYVVSLKKSEIGQKTVEFLGFNITKEGRGLTDTFKTKLLNITPPKDLKQLQSILGLLNFARNFIPNFAELVQPLYNLIAPAKGKYIEWSEENTKQLNMVIEALNTASNLEERLPEQRLVIKVNTSPSAGYVRYYNETGKKPIMYLNYVFSKAELKFSMLEKLLTTMHKALIKAMDLAMGQEILVYSPIVSMTKIQKTPLPERKALPIRWITWMTYLEDPRIQFHYDKTLPELKHIPDVYTSSQSPVKHPSQYEGVFYTDGSAIKSPDPTKSNNAGMGIVHATYKPEYQVLNQWSIPLGNHTAQMAEIAAVEFACKKALKIPGPVLVITDSFYVAESANKELPYWKSNGFVNNKKKPLKHISKWKSIAECLSMKPDITIQHEKGISLQIPVFILKGNALADKLATQGSYVVNAGKRTADGSEFEKRTADGSEFESPKKKAKVE

SEQ ID NO: 7727 - protein, 2149 aa, synthetic construct
MPAAKRVKLDGGDKKYSIGLDIGTNSVGWAVITDEYKVPSKKFKVLGNTDRHSIKKNLIGALLFDSGETAEATRLKRTARRRYTRRKNRICYLQEIFSNEMAKVDDSFFHRLEESFLVEEDKKHERHPIFGNIVDEVAYHEKYPTIYHLRKKLVDSTDKADLRLIYLALAHMIKFRGHFLIEGDLNPDNSDVDKLFIQLVQTYNQLFEENPINASGVDAKAILSARLSKSRRLENLIAQLPGEKKNGLFGNLIALSLGLTPNFKSNFDLAEDAKLQLSKDTYDDDLDNLLAQIGDQYADLFLAAKNLSDAILLSDILRVNTEITKAPLSASMIKRYDEHHQDLTLLKALVRQQLPEKYKEIFFDQSKNGYAGYIDGGASQEEFYKFIKPILEKMDGTEELLVKLNREDLLRKQRTFDNGSIPHQIHLGELHAILRRQEDFYPFLKDNREKIEKILTFRIPYYVGPLARGNSRFAWMTRKSEETITPWNFEEVVDKGASAQSFIERMTNFDKNLPNEKVLPKHSLLYEYFTVYNELTKVKYVTEGMRKPAFLSGEQKKAIVDLLFKTNRKVTVKQLKEDYFKKIECFDSVEISGVEDRFNASLGTYHDLLKIIKDKDFLDNEENEDILEDIVLTLTLFEDREMIEERLKTYAHLFDDKVMKQLKRRRYTGWGRLSRKLINGIRDKQSGKTILDFLKSDGFANRNFMQLIHDDSLTFKEDIQKAQVSGQGDSLHEHIANLAGSPAIKKGILQTVKVVDELVKVMGRHKPENIVIEMARENQTTQKGQKNSRERMKRIEEGIKELGSQILKEHPVENTQLQNEKLYLYYLQNGRDMYVDQELDINRLSDYDVDHIVPQSFLKDDSIDNKVLTRSDKARGKSDNVPSEEVVKKMKNYWRQLLNAKLITQRKFDNLTKAERGGLSELDKAGFIKRQLVETRQITKHVAQILDSRMNTKYDENDKLIREVKVITLKSKLVSDFRKDFQFYKVREINNYHHAHDAYLNAVVGTALIKKYPKLESEFVYGDYKVYDVRKMIAKSEQEIGKATAKYFFYSNIMNFFKTEITLANGEIRKRPLIETNGETGEIVWDKGRDFATVRKVLSMPQVNIVKKTEVQTGGFSKESILPKRNSDKLIARKKDWDPKKYGGFDSPTVAYSVLVVAKVEKGKSKKLKSVKELLGITIMERSSFEKNPIDFLEAKGYKEVKKDLIIKLPKYSLFELENGRKRMLASAGELQKGNELALPSKYVNFLYLASHYEKLKGSPEDNEQKQLFVEQHKHYLDEIIEQISEFSKRVILADANLDKVLSAYNKHRDKPIREQAENIIHLFTLTNLGAPAAFKYFDTTIDRKRYTSTKEVLDATLIHQSITGLYETRIDLSQLGGDGGSGGSSGGSSGSETPGTSESATPESSGGSSGGSSGGLLGRDLLTKLKAQIQFSTEGPQVTWEDRPAMCLVLNLEEEYRLHEKPVPPSIDPSWLQLFPMVWAEKAGMGLANQVPPVVVELKSDASPVAVRQYPMSKEAREGIRPHIQRFLDLGILVPCQSPWNTPLLPVKKPGTNDYRPVQDLREVNKRVQDIHPTVPNPYNLLSSLPPSHTWYSVLDLKDAFFCLKLHPNSQPLFAFEWRDPEKGNTGQLTWTRLPQGFKNSPTLFDEALHRDLASFRALNPQVVMLQYVDDLLVAAPTYRDCKEGTRRLLQELSKLGYRVSAKKAQLCREEVTYLGYLLKGGKRWLTPARKATVMKIPTPTTPRQVREFLGTAGFCRLWIPGFASLAAPLYPLTREKVPFTWTEAHQEAFGRIKEALLSAPALALPDLTKPFALYVDEKEGVARGVLTQTLGPWRRPVAYLSKKLDPVASGWPTCLKAIAAVALLLKDADKLTLGQNVLVIAPHNLESIVRQPPDRWMTNARMTHYQSLLLNERVSFAPPAILNPATLLPVESDDTPIHICSEILAEETGTRPDLRDQPLPGVPAWYTDGSSFIMDGRRQAGAAIVDNKRTVWASNLPEGTSAQKAELIALTQALRLAEGKSINIYTDSRYAFATAHVHGAIYKQRGLLTSAGKDIKNKEEILALLEAIHLPKRVAIIHCPGHQRGTDPVATGNRKADEAAKQAAQSTRILTETTKNAGKRTADGSEFEKRTADGSEFESPKKKAKVE

SEQ ID NO: 7728 - protein, 2149 aa, synthetic construct
MPAAKRVKLDGGDKKYSIGLDIGTNSVGWAVITDEYKVPSKKFKVLGNTDRHSIKKNLIGALLFDSGETAEATRLKRTARRRYTRRKNRICYLQEIFSNEMAKVDDSFFHRLEESFLVEEDKKHERHPIFGNIVDEVAYHEKYPTIYHLRKKLVDSTDKADLRLIYLALAHMIKFRGHFLIEGDLNPDNSDVDKLFIQLVQTYNQLFEENPINASGVDAKAILSARLSKSRRLENLIAQLPGEKKNGLFGNLIALSLGLTPNFKSNFDLAEDAKLQLSKDTYDDDLDNLLAQIGDQYADLFLAAKNLSDAILLSDILRVNTEITKAPLSASMIKRYDEHHQDLTLLKALVRQQLPEKYKEIFFDQSKNGYAGYIDGGASQEEFYKFIKPILEKMDGTEELLVKLNREDLLRKQRTFDNGSIPHQIHLGELHAILRRQEDFYPFLKDNREKIEKILTFRIPYYVGPLARGNSRFAWMTRKSEETITPWNFEEVVDKGASAQSFIERMTNFDKNLPNEKVLPKHSLLYEYFTVYNELTKVKYVTEGMRKPAFLSGEQKKAIVDLLFKTNRKVTVKQLKEDYFKKIECFDSVEISGVEDRFNASLGTYHDLLKIIKDKDFLDNEENEDILEDIVLTLTLFEDREMIEERLKTYAHLFDDKVMKQLKRRRYTGWGRLSRKLINGIRDKQSGKTILDFLKSDGFANRNFMQLIHDDSLTFKEDIQKAQVSGQGDSLHEHIANLAGSPAIKKGILQTVKVVDELVKVMGRHKPENIVIEMARENQTTQKGQKNSRERMKRIEEGIKELGSQILKEHPVENTQLQNEKLYLYYLQNGRDMYVDQELDINRLSDYDVDHIVPQSFLKDDSIDNKVLTRSDKARGKSDNVPSEEVVKKMKNYWRQLLNAKLITQRKFDNLTKAERGGLSELDKAGFIKRQLVETRQITKHVAQILDSRMNTKYDENDKLIREVKVITLKSKLVSDFRKDFQFYKVREINNYHHAHDAYLNAVVGTALIKKYPKLESEFVYGDYKVYDVRKMIAKSEQEIGKATAKYFFYSNIMNFFKTEITLANGEIRKRPLIETNGETGEIVWDKGRDFATVRKVLSMPQVNIVKKTEVQTGGFSKESILPKRNSDKLIARKKDWDPKKYGGFDSPTVAYSVLVVAKVEKGKSKKLKSVKELLGITIMERSSFEKNPIDFLEAKGYKEVKKDLIIKLPKYSLFELENGRKRMLASAGELQKGNELALPSKYVNFLYLASHYEKLKGSPEDNEQKQLFVEQHKHYLDEIIEQISEFSKRVILADANLDKVLSAYNKHRDKPIREQAENIIHLFTLTNLGAPAAFKYFDTTIDRKRYTSTKEVLDATLIHQSITGLYETRIDLSQLGGDGGSGGSSGGSSGSETPGTSESATPESSGGSSGGSSGGLLGRDLLTKLKAQIQFSTEGPQVTWEDRPAMCLVLNLEEEYRLHEKPVPPSIDPSWLQLFPMVWAEKAGMGLANQVPPVVVELKSDASPVAVRQYPMSKEAREGIRPHIQRFLDLGILVPCQSPWNTPLLPVKKPGTNDYRPVQDLREVNKRVQDIHPTVPNPYNLLSSLPPSHTWYSVLDLKDAFFCLKLHPNSQPLFAFEWRDPEKGNTGQLTWTRLPQGFKNSPTLFNEALHRDLASFRALNPQVVMLQYVDDLLVAAPTYRDCKEGTRRLLQELSKLGYRVSAKKAQLCREEVTYLGYLLKGGKRWLTPARKATVMKIPTPTTPRQVREFLGKAGFCRLFIPGFASLAAPLYPLTRPKVPFTWTEAHQEAFGRIKEALLSAPALALPDLTKPFALYVDEKEGVARGVLTQTLGPWRRPVAYLSKKLDPVASGWPTCLKAIAAVALLLKDADKLTLGQNVLVIAPHNLESIVRQPPDRWMTNARMTHYQSLLLNERVSFAPPAILNPATLLPVESDDTPIHICSEILAEETGTRPDLRDQPLPGVPAWYTDGSSFIMDGRRQAGAAIVDNKRTVWASNLPEGTSAQKAELIALTQALRLAEGKSINIYTDSRYAFATAHVHGAIYKQRGWLTSAGKDIKNKEEILALLEAIHLPKRVAIIHCPGHQRGTDPVATGNRKADEAAKQAAQSTRILTETTKNAGKRTADGSEFEKRTADGSEFESPKKKAKVE

SEQ ID NO: 7729 - protein, 2118 aa, synthetic construct
MPAAKRVKLDGGDKKYSIGLDIGTNSVGWAVITDEYKVPSKKFKVLGNTDRHSIKKNLIGALLFDSGETAEATRLKRTARRRYTRRKNRICYLQEIFSNEMAKVDDSFFHRLEESFLVEEDKKHERHPIFGNIVDEVAYHEKYPTIYHLRKKLVDSTDKADLRLIYLALAHMIKFRGHFLIEGDLNPDNSDVDKLFIQLVQTYNQLFEENPINASGVDAKAILSARLSKSRRLENLIAQLPGEKKNGLFGNLIALSLGLTPNFKSNFDLAEDAKLQLSKDTYDDDLDNLLAQIGDQYADLFLAAKNLSDAILLSDILRVNTEITKAPLSASMIKRYDEHHQDLTLLKALVRQQLPEKYKEIFFDQSKNGYAGYIDGGASQEEFYKFIKPILEKMDGTEELLVKLNREDLLRKQRTFDNGSIPHQIHLGELHAILRRQEDFYPFLKDNREKIEKILTFRIPYYVGPLARGNSRFAWMTRKSEETITPWNFEEVVDKGASAQSFIERMTNFDKNLPNEKVLPKHSLLYEYFTVYNELTKVKYVTEGMRKPAFLSGEQKKAIVDLLFKTNRKVTVKQLKEDYFKKIECFDSVEISGVEDRFNASLGTYHDLLKIIKDKDFLDNEENEDILEDIVLTLTLFEDREMIEERLKTYAHLFDDKVMKQLKRRRYTGWGRLSRKLINGIRDKQSGKTILDFLKSDGFANRNFMQLIHDDSLTFKEDIQKAQVSGQGDSLHEHIANLAGSPAIKKGILQTVKVVDELVKVMGRHKPENIVIEMARENQTTQKGQKNSRERMKRIEEGIKELGSQILKEHPVENTQLQNEKLYLYYLQNGRDMYVDQELDINRLSDYDVDHIVPQSFLKDDSIDNKVLTRSDKARGKSDNVPSEEVVKKMKNYWRQLLNAKLITQRKFDNLTKAERGGLSELDKAGFIKRQLVETRQITKHVAQILDSRMNTKYDENDKLIREVKVITLKSKLVSDFRKDFQFYKVREINNYHHAHDAYLNAVVGTALIKKYPKLESEFVYGDYKVYDVRKMIAKSEQEIGKATAKYFFYSNIMNFFKTEITLANGEIRKRPLIETNGETGEIVWDKGRDFATVRKVLSMPQVNIVKKTEVQTGGFSKESILPKRNSDKLIARKKDWDPKKYGGFDSPTVAYSVLVVAKVEKGKSKKLKSVKELLGITIMERSSFEKNPIDFLEAKGYKEVKKDLIIKLPKYSLFELENGRKRMLASAGELQKGNELALPSKYVNFLYLASHYEKLKGSPEDNEQKQLFVEQHKHYLDEIIEQISEFSKRVILADANLDKVLSAYNKHRDKPIREQAENIIHLFTLTNLGAPAAFKYFDTTIDRKRYTSTKEVLDATLIHQSITGLYETRIDLSQLGGDGGSGGSSGGSSGSETPGTSESATPESSGGSSGGSSGGTLNLEDEYRLYETSAEPEVSPGSTWLSDFPQAWAETGGMGLAVRQAPLIIPLKATSTPVSIKQYPMSQEAKLGIKPHIQRLLDQGILVPCQSPWNTPLLPVKKPGTNDYRPVQDLREVNKRVEDIHPTVPNPYNLLSGLPPSHRWYTVLDLKDAFFCLRLHPTSQPLFAFEWRDPGMGISGQLTWTRLPQGFKNSPTLFNEALHRDLADFRIQHPDLILLQYVDDILLAATSELDCQQGTRALLLTLGNLGYRASAKKAQLCQKQVKYLGYLLKEGQRWLTEARKETVMGQPTPKTPRQLREFLGKAGFCRLFIPGFAEMAAPLYPLTKPGTLFNWGPDQQKAYQEIKQALLTAPALGLPDLTKPFELFVDEKQGYAKGVLTQKLGPWRRPVAYLSKKLDPVAAGWPPCLRMVAAIAVLRKDAGKLTMGQPLVILAPHAVEALVKQPPDRWLSNARMTHYQAMLLDTDRVQFGPVVALNPATLLPLPEEGAPHDCLEILAETHGTRPDLTDQPIPDADHTWYTDGSSFLQEGQRKAGAAVTTETEVIWARALPAGTSAQRAELIALTQALKMAEGKRLNVYTDSRYAFATAHIHGEIYRRRGWLTSEGREIKNKSEILALLKALFLPKRLSIIHCLGHQKGDSAEARGNRLADQAAREAAIKTPPDTSTLLAGKRTADGSEFEKRTADGSEFESPKKKAKVE

SEQ ID NO: 7730 - protein, 2118 aa, synthetic construct
MPAAKRVKLDGGDKKYSIGLDIGTNSVGWAVITDEYKVPSKKFKVLGNTDRHSIKKNLIGALLFDSGETAEATRLKRTARRRYTRRKNRICYLQEIFSNEMAKVDDSFFHRLEESFLVEEDKKHERHPIFGNIVDEVAYHEKYPTIYHLRKKLVDSTDKADLRLIYLALAHMIKFRGHFLIEGDLNPDNSDVDKLFIQLVQTYNQLFEENPINASGVDAKAILSARLSKSRRLENLIAQLPGEKKNGLFGNLIALSLGLTPNFKSNFDLAEDAKLQLSKDTYDDDLDNLLAQIGDQYADLFLAAKNLSDAILLSDILRVNTEITKAPLSASMIKRYDEHHQDLTLLKALVRQQLPEKYKEIFFDQSKNGYAGYIDGGASQEEFYKFIKPILEKMDGTEELLVKLNREDLLRKQRTFDNGSIPHQIHLGELHAILRRQEDFYPFLKDNREKIEKILTFRIPYYVGPLARGNSRFAWMTRKSEETITPWNFEEVVDKGASAQSFIERMTNFDKNLPNEKVLPKHSLLYEYFTVYNELTKVKYVTEGMRKPAFLSGEQKKAIVDLLFKTNRKVTVKQLKEDYFKKIECFDSVEISGVEDRFNASLGTYHDLLKIIKDKDFLDNEENEDILEDIVLTLTLFEDREMIEERLKTYAHLFDDKVMKQLKRRRYTGWGRLSRKLINGIRDKQSGKTILDFLKSDGFANRNFMQLIHDDSLTFKEDIQKAQVSGQGDSLHEHIANLAGSPAIKKGILQTVKVVDELVKVMGRHKPENIVIEMARENQTTQKGQKNSRERMKRIEEGIKELGSQILKEHPVENTQLQNEKLYLYYLQNGRDMYVDQELDINRLSDYDVDHIVPQSFLKDDSIDNKVLTRSDKARGKSDNVPSEEVVKKMKNYWRQLLNAKLITQRKFDNLTKAERGGLSELDKAGFIKRQLVETRQITKHVAQILDSRMNTKYDENDKLIREVKVITLKSKLVSDFRKDFQFYKVREINNYHHAHDAYLNAVVGTALIKKYPKLESEFVYGDYKVYDVRKMIAKSEQEIGKATAKYFFYSNIMNFFKTEITLANGEIRKRPLIETNGETGEIVWDKGRDFATVRKVLSMPQVNIVKKTEVQTGGFSKESILPKRNSDKLIARKKDWDPKKYGGFDSPTVAYSVLVVAKVEKGKSKKLKSVKELLGITIMERSSFEKNPIDFLEAKGYKEVKKDLIIKLPKYSLFELENGRKRMLASAGELQKGNELALPSKYVNFLYLASHYEKLKGSPEDNEQKQLFVEQHKHYLDEIIEQISEFSKRVILADANLDKVLSAYNKHRDKPIREQAENIIHLFTLTNLGAPAAFKYFDTTIDRKRYTSTKEVLDATLIHQSITGLYETRIDLSQLGGDGGSGGSSGGSSGSETPGTSESATPESSGGSSGGSSGGTLNIEDEYRLHETSKEPDVSLGSTWLSDFPQAWAETGGMGLAVRQAPLIIPLKATSTPVSIKQYPMSQEARLGIKPHIQRLLDQGILVPCQSPWNTPLLPVKKPGTNDYRPVQDLREVNKRVEDIHPTVPNPYNLLSGLPPSHQWYTVLDLKDAFFCLRLHPTSQPLFAFEWRDPEMGISGQLTWTRLPQGFKNSPTLFNEALHRDLAGFRIQHPDLILLQYVDDLLLAATSELDCQQGTRALLQTLGDLGYRASAKKAQICQKQVKYLGYLLKEGQRWLTEARKETVMGQPIPKTPRQLREFLGTAGFCRLWIPGFAEMAAPLYPLTKPGTLFNWGPDQQKAFQEIKQALLTAPALGLPDLTKPFELFVDEKQGYAKGVLTQKLGPWRRPVAYLSKKLDPVAAGWPPCLRMVAAIAVLTKDAGKLTMGQPLVILAPHAVEALVKQPPDRWLSNARMTHYQALLLDTDRVQFGPVVALNPATLLPLPEEGLQHDCLDILAEAHGTRSDLMDQPLPDADHTWYTDGSSFLQEGQRKAGAAVTTETEVIWARALPAGTSAQRAELIALTQALKMAEGKKLNVYTDSRYAFATAHIHGEIYRRRGWLTSEGKEIKNKDEILALLKALFLPKRLSIIHCPGHQKGNSAEARGNRMADQAAREVATRETPETSTLLAGKRTADGSEFEKRTADGSEFESPKKKAKVE

SEQ ID NO: 7731 - protein, 2118 aa, synthetic construct
MPAAKRVKLDGGDKKYSIGLDIGTNSVGWAVITDEYKVPSKKFKVLGNTDRHSIKKNLIGALLFDSGETAEATRLKRTARRRYTRRKNRICYLQEIFSNEMAKVDDSFFHRLEESFLVEEDKKHERHPIFGNIVDEVAYHEKYPTIYHLRKKLVDSTDKADLRLIYLALAHMIKFRGHFLIEGDLNPDNSDVDKLFIQLVQTYNQLFEENPINASGVDAKAILSARLSKSRRLENLIAQLPGEKKNGLFGNLIALSLGLTPNFKSNFDLAEDAKLQLSKDTYDDDLDNLLAQIGDQYADLFLAAKNLSDAILLSDILRVNTEITKAPLSASMIKRYDEHHQDLTLLKALVRQQLPEKYKEIFFDQSKNGYAGYIDGGASQEEFYKFIKPILEKMDGTEELLVKLNREDLLRKQRTFDNGSIPHQIHLGELHAILRRQEDFYPFLKDNREKIEKILTFRIPYYVGPLARGNSRFAWMTRKSEETITPWNFEEVVDKGASAQSFIERMTNFDKNLPNEKVLPKHSLLYEYFTVYNELTKVKYVTEGMRKPAFLSGEQKKAIVDLLFKTNRKVTVKQLKEDYFKKIECFDSVEISGVEDRFNASLGTYHDLLKIIKDKDFLDNEENEDILEDIVLTLTLFEDREMIEERLKTYAHLFDDKVMKQLKRRRYTGWGRLSRKLINGIRDKQSGKTILDFLKSDGFANRNFMQLIHDDSLTFKEDIQKAQVSGQGDSLHEHIANLAGSPAIKKGILQTVKVVDELVKVMGRHKPENIVIEMARENQTTQKGQKNSRERMKRIEEGIKELGSQILKEHPVENTQLQNEKLYLYYLQNGRDMYVDQELDINRLSDYDVDHIVPQSFLKDDSIDNKVLTRSDKARGKSDNVPSEEVVKKMKNYWRQLLNAKLITQRKFDNLTKAERGGLSELDKAGFIKRQLVETRQITKHVAQILDSRMNTKYDENDKLIREVKVITLKSKLVSDFRKDFQFYKVREINNYHHAHDAYLNAVVGTALIKKYPKLESEFVYGDYKVYDVRKMIAKSEQEIGKATAKYFFYSNIMNFFKTEITLANGEIRKRPLIETNGETGEIVWDKGRDFATVRKVLSMPQVNIVKKTEVQTGGFSKESILPKRNSDKLIARKKDWDPKKYGGFDSPTVAYSVLVVAKVEKGKSKKLKSVKELLGITIMERSSFEKNPIDFLEAKGYKEVKKDLIIKLPKYSLFELENGRKRMLASAGELQKGNELALPSKYVNFLYLASHYEKLKGSPEDNEQKQLFVEQHKHYLDEIIEQISEFSKRVILADANLDKVLSAYNKHRDKPIREQAENIIHLFTLTNLGAPAAFKYFDTTIDRKRYTSTKEVLDATLIHQSITGLYETRIDLSQLGGDGGSGGSSGGSSGSETPGTSESATPESSGGSSGGSSGGTLNIEDEHRLHETSKEPDVSLGSTWLSDFPQAWAETGGMGLAVRQAPLIIPLKATSTPVSIKQYPMSQEARLGIKPHIQRLLDQGILVPCQSPWNTPLLPVKKPGTNDYRPVQDLREVNKRVEDIHPTVPNPYNLLSGLPPSHQWYTVLDLKDAFFCLRLHPTSQPLFAFEWRDPEMGISGQLTWTRLPQGFKNSPTLFDEALHRDLADFRIQHPDLILLQYVDDLLLAATSELDCQQGTRALLQTLGNLGYRASAKKAQICQKQVKYLGYLLKEGQRWLTEARKETVMGQPTPKTPRQLREFLGTAGFCRLWIPGFAEMAAPLYPLTKTGTLFNWGPDQQKAYQEIKQALLTAPALGLPDLTKPFELFVDEKQGYAKGVLTQKLGPWRRPVAYLSKKLDPVAAGWPPCLRMVAAIAVLTKDAGKLTMGQPLVILAPHAVEALVKQPPDRWLSNARMTHYQALLLDTDRVQFGPVVALNPATLLPLPEEGLQHNCLDILAEAHGTRPDLTDQPLPDADHTWYTDGSSLLQEGQRKAGAAVTTETEVIWAKALPAGTSAQRAELIALTQALKMAEGKKLNVYTDSRYAFATAHIHGEIYRRRGLLTSEGKEIKNKDEILALLKALFLPKRLSIIHCPGHQKGHSAEARGNRMADQAARKAAITETPDTSTLLAGKRTADGSEFEKRTADGSEFESPKKKAKVE

SEQ ID NO: 7732 - protein, 2118 aa, synthetic construct; identical to SEQ ID NO: 7731

SEQ ID NO: 7733 - protein, 2138 aa, synthetic construct
MPAAKRVKLDGGDKKYSIGLDIGTNSVGWAVITDEYKVPSKKFKVLGNTDRHSIKKNLIGALLFDSGETAEATRLKRTARRRYTRRKNRICYLQEIFSNEMAKVDDSFFHRLEESFLVEEDKKHERHPIFGNIVDEVAYHEKYPTIYHLRKKLVDSTDKADLRLIYLALAHMIKFRGHFLIEGDLNPDNSDVDKLFIQLVQTYNQLFEENPINASGVDAKAILSARLSKSRRLENLIAQLPGEKKNGLFGNLIALSLGLTPNFKSNFDLAEDAKLQLSKDTYDDDLDNLLAQIGDQYADLFLAAKNLSDAILLSDILRVNTEITKAPLSASMIKRYDEHHQDLTLLKALVRQQLPEKYKEIFFDQSKNGYAGYIDGGASQEEFYKFIKPILEKMDGTEELLVKLNREDLLRKQRTFDNGSIPHQIHLGELHAILRRQEDFYPFLKDNREKIEKILTFRIPYYVGPLARGNSRFAWMTRKSEETITPWNFEEVVDKGASAQSFIERMTNFDKNLPNEKVLPKHSLLYEYFTVYNELTKVKYVTEGMRKPAFLSGEQKKAIVDLLFKTNRKVTVKQLKEDYFKKIECFDSVEISGVEDRFNASLGTYHDLLKIIKDKDFLDNEENEDILEDIVLTLTLFEDREMIEERLKTYAHLFDDKVMKQLKRRRYTGWGRLSRKLINGIRDKQSGKTILDFLKSDGFANRNFMQLIHDDSLTFKEDIQKAQVSGQGDSLHEHIANLAGSPAIKKGILQTVKVVDELVKVMGRHKPENIVIEMARENQTTQKGQKNSRERMKRIEEGIKELGSQILKEHPVENTQLQNEKLYLYYLQNGRDMYVDQELDINRLSDYDVDHIVPQSFLKDDSIDNKVLTRSDKARGKSDNVPSEEVVKKMKNYWRQLLNAKLITQRKFDNLTKAERGGLSELDKAGFIKRQLVETRQITKHVAQILDSRMNTKYDENDKLIREVKVITLKSKLVSDFRKDFQFYKVREINNYHHAHDAYLNAVVGTALIKKYPKLESEFVYGDYKVYDVRKMIAKSEQEIGKATAKYFFYSNIMNFFKTEITLANGEIRKRPLIETNGETGEIVWDKGRDFATVRKVLSMPQVNIVKKTEVQTGGFSKESILPKRNSDKLIARKKDWDPKKYGGFDSPTVAYSVLVVAKVEKGKSKKLKSVKELLGITIMERSSFEKNPIDFLEAKGYKEVKKDLIIKLPKYSLFELENGRKRMLASAGELQKGNELALPSKYVNFLYLASHYEKLKGSPEDNEQKQLFVEQHKHYLDEIIEQISEFSKRVILADANLDKVLSAYNKHRDKPIREQAENIIHLFTLTNLGAPAAFKYFDTTIDRKRYTSTKEVLDATLIHQSITGLYETRIDLSQLGGDGGSGGSSGGSSGSETPGTSESATPESSGGSSGGSSGGWVQEISDSRPMLHIYLNGRRFLGLLNTGADKTCIAGRDWPANWPIHQTESSLQGLGMACGVARSSQPLRWQHEDKSGIIHPFVIPTLPFTLWGRDIMKDIKVRLMTDSPDDSQDLMIGAIESNLFADQISWKSDQPVWLNQWPLKQEKLQALQQLVTEQLQLGHLEESNSPWNTPVFVIKKKSGKWRLLQDLRAVNATMHDMGALQPGLPSPVAVPKGWEIIIIDLQDCFFNIKLHPEDCKRFAFSVPSPNFKRPYQRFQWKVLPQGMKNSPTLCQKFVDKAILTVRDKYQDSYIVHYMDDILLAHPSRSIVDEILTSMIQALNKHGLVVSTEKIQKYDNLKYLGTHIQGDSVSYQKLQIRTDKLRTLNDFQKLLGNINWIRPFLKLTTGELKPLFEILNGDSNPISTRKLTPEACKALQLMNERLSTARVKRLDLSQPWSLCILKTEYTPTACLWQDGVVEWIHLPHISPKVITPYDIFCTQLIIKGRHRSKELFSKDPDYIVVPYTKVQFDLLLQEKEDWPISLLGFLGEVHFHLPKDPLLTFTLQTAIIFPHMTSTTPLEKGIVIFTDGSANGRSVTYIQGREPIIKENTQNTAQQAEIVAVITAFEEVSQPFNLYTDSKYVTGLFPEIETATLSPRTKIYTELKHLQRLIHKRQEKFYIGHIRGHTGLPGPLAQGNAYADSLTRILTAGKRTADGSEFEKRTADGSEFESPKKKAKVE

SEQ ID NO: 7734 - protein, 2110 aa, synthetic construct
MPAAKRVKLDGGDKKYSIGLDIGTNSVGWAVITDEYKVPSKKFKVLGNTDRHSIKKNLIGALLFDSGETAEATRLKRTARRRYTRRKNRICYLQEIFSNEMAKVDDSFFHRLEESFLVEEDKKHERHPIFGNIVDEVAYHEKYPTIYHLRKKLVDSTDKADLRLIYLALAHMIKFRGHFLIEGDLNPDNSDVDKLFIQLVQTYNQLFEENPINASGVDAKAILSARLSKSRRLENLIAQLPGEKKNGLFGNLIALSLGLTPNFKSNFDLAEDAKLQLSKDTYDDDLDNLLAQIGDQYADLFLAAKNLSDAILLSDILRVNTEITKAPLSASMIKRYDEHHQDLTLLKALVRQQLPEKYKEIFFDQSKNGYAGYIDGGASQEEFYKFIKPILEKMDGTEELLVKLNREDLLRKQRTFDNGSIPHQIHLGELHAILRRQEDFYPFLKDNREKIEKILTFRIPYYVGPLARGNSRFAWMTRKSEETITPWNFEEVVDKGASAQSFIERMTNFDKNLPNEKVLPKHSLLYEYFTVYNELTKVKYVTEGMRKPAFLSGEQKKAIVDLLFKTNRKVTVKQLKEDYFKKIECFDSVEISGVEDRFNASLGTYHDLLKIIKDKDFLDNEENEDILEDIVLTLTLFEDREMIEERLKTYAHLFDDKVMKQLKRRRYTGWGRLSRKLINGIRDKQSGKTILDFLKSDGFANRNFMQLIHDDSLTFKEDIQKAQVSGQGDSLHEHIANLAGSPAIKKGILQTVKVVDELVKVMGRHKPENIVIEMARENQTTQKGQKNSRERMKRIEEGIKELGSQILKEHPVENTQLQNEKLYLYYLQNGRDMYVDQELDINRLSDYDVDHIVPQSFLKDDSIDNKVLTRSDKARGKSDNVPSEEVVKKMKNYWRQLLNAKLITQRKFDNLTKAERGGLSELDKAGFIKRQLVETRQITKHVAQILDSRMNTKYDENDKLIREVKVITLKSKLVSDFRKDFQFYKVREINNYHHAHDAYLNAVVGTALIKKYPKLESEFVYGDYKVYDVRKMIAKSEQEIGKATAKYFFYSNIMNFFKTEITLANGEIRKRPLIETNGETGEIVWDKGRDFATVRKVLSMPQVNIVKKTEVQTGGFSKESILPKRNSDKLIARKKDWDPKKYGGFDSPTVAYSVLVVAKVEKGKSKKLKSVKELLGITIMERSSFEKNPIDFLEAKGYKEVKKDLIIKLPKYSLFELENGRKRMLASAGELQKGNELALPSKYVNFLYLASHYEKLKGSPEDNEQKQLFVEQHKHYLDEIIEQISEFSKRVILADANLDKVLSAYNKHRDKPIREQAENIIHLFTLTNLGAPAAFKYFDTTIDRKRYTSTKEVLDATLIHQSITGLYETRIDLSQLGGDGGSGGSSGGSSGSETPGTSESATPESSGGSSGGSSGGLDDEYRLYSPLVKPDQNIQFWLEQFPQAWAETAGMGLAKQVPPQVIQLKASATPVSVRQYPLSKEAQEGIRPHVQRLIQQGILVPVQSPWNTPLLPVRKPGTNDYRPVQDLREVNKRVQDIHPTVPNPYNLLCALPPQRSWYTVLDLKDAFFCLRLHPTSQPLFAFEWRDPGTGRTGQLTWTRLPQGFKNSPTIFNEALHRDLANFRIQHPQVTLLQYVDDLLLAGATKQDCLEGTKALLLELSDLGYRASAKKAQICRREVTYLGYSLRDGQRWLTEARKKTVVQIPAPTTAKQVREFLGKAGFCRLFIPGFATLAAPLYPLTKPKGEFSWAPEHQKAFDAIKKALLSAPALALPDVTKPFTLYVDERKGVARGVLTQTLGPWRRPVAYLSKKLDPVASGWPVCLKAIAAVAILVKDADKLTLGQNITVIAPHALENIVRQPPDRWMTNARMTHYQSLLLTERVTFAPPAALNPATLLPEETDEPVTHDCHQLLIEETGVRKDLTDIPLTGEVLTWFTDGSSYVVEGKRMAGAAVVDGTRTIWASSLPEGTSAQKAELMALTQALRLAEGKSINIYTDSRYAFATAHVHGAIYKQRGWLTSAGREIKNKEEILSLLEALHLPKRLAIIHCPGHQKAKDPISRGNQMADRVAKQAAQGVNLLPAGKRTADGSEFEKRTADGSEFESPKKKAKVE

SEQ ID NO: 7735 - protein, 2110 aa, synthetic construct; identical to SEQ ID NO: 7734

SEQ ID NO: 7736 - protein, 2109 aa, synthetic construct
MPAAKRVKLDGGDKKYSIGLDIGTNSVGWAVITDEYKVPSKKFKVLGNTDRHSIKKNLIGALLFDSGETAEATRLKRTARRRYTRRKNRICYLQEIFSNEMAKVDDSFFHRLEESFLVEEDKKHERHPIFGNIVDEVAYHEKYPTIYHLRKKLVDSTDKADLRLIYLALAHMIKFRGHFLIEGDLNPDNSDVDKLFIQLVQTYNQLFEENPINASGVDAKAILSARLSKSRRLENLIAQLPGEKKNGLFGNLIALSLGLTPNFKSNFDLAEDAKLQLSKDTYDDDLDNLLAQIGDQYADLFLAAKNLSDAILLSDILRVNTEITKAPLSASMIKRYDEHHQDLTLLKALVRQQLPEKYKEIFFDQSKNGYAGYIDGGASQEEFYKFIKPILEKMDGTEELLVKLNREDLLRKQRTFDNGSIPHQIHLGELHAILRRQEDFYPFLKDNREKIEKILTFRIPYYVGPLARGNSRFAWMTRKSEETITPWNFEEVVDKGASAQSFIERMTNFDKNLPNEKVLPKHSLLYEYFTVYNELTKVKYVTEGMRKPAFLSGEQKKAIVDLLFKTNRKVTVKQLKEDYFKKIECFDSVEISGVEDRFNASLGTYHDLLKIIKDKDFLDNEENEDILEDIVLTLTLFEDREMIEERLKTYAHLFDDKVMKQLKRRRYTGWGRLSRKLINGIRDKQSGKTILDFLKSDGFANRNFMQLIHDDSLTFKEDIQKAQVSGQGDSLHEHIANLAGSPAIKKGILQTVKVVDELVKVMGRHKPENIVIEMARENQTTQKGQKNSRERMKRIEEGIKELGSQILKEHPVENTQLQNEKLYLYYLQNGRDMYVDQELDINRLSDYDVDHIVPQSFLKDDSIDNKVLTRSDKARGKSDNVPSEEVVKKMKNYWRQLLNAKLITQRKFDNLTKAERGGLSELDKAGFIKRQLVETRQITKHVAQILDSRMNTKYDENDKLIREVKVITLKSKLVSDFRKDFQFYKVREINNYHHAHDAYLNAVVGTALIKKYPKLESEFVYGDYKVYDVRKMIAKSEQEIGKATAKYFFYSNIMNFFKTEITLANGEIRKRPLIETNGETGEIVWDKGRDFATVRKVLSMPQVNIVKKTEVQTGGFSKESILPKRNSDKLIARKKDWDPKKYGGFDSPTVAYSVLVVAKVEKGKSKKLKSVKELLGITIMERSSFEKNPIDFLEAKGYKEVKKDLIIKLPKYSLFELENGRKRMLASAGELQKGNELALPSKYVNFLYLASHYEKLKGSPEDNEQKQLFVEQHKHYLDEIIEQISEFSKRVILADANLDKVLSAYNKHRDKPIREQAENIIHLFTLTNLGAPAAFKYFDTTIDRKRYTSTKEVLDATLIHQSITGLYETRIDLSQLGGDGGSGGSSGGSSGSETPGTSESATPESSGGSSGGSSGGVPWLMKKPLQLTVLVPLHEYQERLLQQTALPKEQKELLQKLFLKYDALWQHWENQVGHRRIKPHNIATGTLAPRPQKQYPINPKAKPSIQIVIDDLLKQGVLIQQNSTMNTPVYPVPKPDGKWRMVLDYREVNKTIPLIAAQNQHSAGILSSIYRGKYKTTLDLTNGFWAHPITPESYWLTAFTWQGKQYCWTRLPQGFLNSPALFTADVVDLLKEIPNVQAYVDDIYISHDDPQEHLEQLEKIFSILLNAGYVVSLKKSEIAQREVEFLGFNITKEGRGLTDTFKQKLLNITPPKDLKQLQSILGLLNFARNFIPNYSELVKPLYTIVANANGKFISWTEDNSNQLQHIISVLNQADNLEERNPETRLIIKVNSSPSAGYIRYYNEGSKRPIMYVNYIFSKAEAKFTQTEKLLTTMHKGLIKAMDLAMGQEILVYSPIVSMTKIQRTPLPERKALPVRWITWMTYLEDPRIQFHYDKSLPELQQIPNVTEDVIAKTKHPSEFAMVFYTDGSAIKHPDVNKSHSAGMGIAQVQFIPEYKIVHQWSIPLGDHTAQLAEIAAVEFACKKALKISGPVLIVTDSFYVAESANKELPYWKSNGFLNNKKKPLRHVSKWKSIAECLQLKPDIIIMHEKGHQQPMTTLHTEGNNLADKLATQGSYVVHAGKRTADGSEFEKRTADGSEFESPKKKAKVE

SEQ ID NO: 7737 - protein, 2109 aa, synthetic construct
MPAAKRVKLDGGDKKYSIGLDIGTNSVGWAVITDEYKVPSKKFKVLGNTDRHSIKKNLIGALLFDSGETAEATRLKRTARRRYTRRKNRICYLQEIFSNEMAKVDDSFFHRLEESFLVEEDKKHERHPIFGNIVDEVAYHEKYPTIYHLRKKLVDSTDKADLRLIYLALAHMIKFRGHFLIEGDLNPDNSDVDKLFIQLVQTYNQLFEENPINASGVDAKAILSARLSKSRRLENLIAQLPGEKKNGLFGNLIALSLGLTPNFKSNFDLAEDAKLQLSKDTYDDDLDNLLAQIGDQYADLFLAAKNLSDAILLSDILRVNTEITKAPLSASMIKRYDEHHQDLTLLKALVRQQLPEKYKEIFFDQSKNGYAGYIDGGASQEEFYKFIKPILEKMDGTEELLVKLNREDLLRKQRTFDNGSIPHQIHLGELHAILRRQEDFYPFLKDNREKIEKILTFRIPYYVGPLARGNSRFAWMTRKSEETITPWNFEEVVDKGASAQSFIERMTNFDKNLPNEKVLPKHSLLYEYFTVYNELTKVKYVTEGMRKPAFLSGEQKKAIVDLLFKTNRKVTVKQLKEDYFKKIECFDSVEISGVEDRFNASLGTYHDLLKIIKDKDFLDNEENEDILEDIVLTLTLFEDREMIEERLKTYAHLFDDKVMKQLKRRRYTGWGRLSRKLINGIRDKQSGKTILDFLKSDGFANRNFMQLIHDDSLTFKEDIQKAQVSGQGDSLHEHIANLAGSPAIKKGILQTVKVVDELVKVMGRHKPENIVIEMARENQTTQKGQKNSRERMKRIEEGIKELGSQILKEHPVENTQLQNEKLYLYYLQNGRDMYVDQELDINRLSDYDVDHIVPQSFLKDDSIDNKVLTRSDKARGKSDNVPSEEVVKKMKNYWRQLLNAKLITQRKFDNLTKAERGGLSELDKAGFIKRQLVETRQITKHVAQILDSRMNTKYDENDKLIREVKVITLKSKLVSDFRKDFQFYKVREINNYHHAHDAYLNAVVGTALIKKYPKLESEFVYGDYKVYDVRKMIAKSEQEIGKATAKYFFYSNIMNFFKTEITLANGEIRKRPLIETNGETGEIVWDKGRDFATVRKVLSMPQVNIVKKTEVQTGGFSKESILPKRNSDKLIARKKDWDPKKYGGFDSPTVAYSVLVVAKVEKGKSKKLKSVKELLGITIMERSSFEKNPIDFLEAKGYKEVKKDLIIKLPKYSLFELENGRKRMLASAGELQKGNELALPSKYVNFLYLASHYEKLKGSPEDNEQKQLFVEQHKHYLDEIIEQISEFSKRVILADANLDKVLSAYNKHRDKPIREQAENIIHLFTLTNLGAPAAFKYFDTTIDRKRYTSTKEVLDATLIHQSITGLYETRIDLSQLGGDGGSGGSSGGSSGSETPGTSESATPESSGGSSGGSSGGVPWLMKKPLQLTVLVPLHEYQERLLQQTALPKEQKELLQKLFLKYDALWQHWENQVGHRRIKPHNIATGTLAPRPQKQYPINPKAKPSIQIVIDDLLKQGVLIQQNSTMNTPVYPVPKPDGKWRMVLDYREVNKTIPLIAAQNQHSAGILSSIYRGKYKTTLDLTNGFWAHPITPESYWLTAFTWQGKQYCWTRLPQGFLNSPALFNADVVDLLKEIPNVQAYVDDIYISHDDPQEHLEQLEKIFSILLNAGYVVSLKKSEIAQREVEFLGFNITKEGRGLTDTFKQKLLNITPPKDLKQLQSILGLLNFARNFIPNYSELVKPLYTIVAPANGKFISWTEDNSNQLQHIISVLNQADNLEERNPETRLIIKVNSSPSAGYIRYYNEGSKRPIMYVNYIFSKAEAKFTQTEKLLTTMHKGLIKAMDLAMGQEILVYSPIVSMTKIQRTPLPERKALPVRWITWMTYLEDPRIQFHYDKSLPELQQIPNVTEDVIAKTKHPSEFAMVFYTDGSAIKHPDVNKSHSAGMGIAQVQFIPEYKIVHQWSIPLGDHTAQLAEIAAVEFACKKALKISGPVLIVTDSFYVAESANKELPYWKSNGFLNNKKKPLRHVSKWKSIAECLQLKPDIIIMHEKGHQQPMTTLHTEGNNLADKLATQGSYVVHAGKRTADGSEFEKRTADGSEFESPKKKAKVE

SEQ ID NO: 7738 - protein, 2198 aa, synthetic construct
MPAAKRVKLDGGDKKYSIGLDIGTNSVGWAVITDEYKVPSKKFKVLGNTDRHSIKKNLIGALLFDSGETAEATRLKRTARRRYTRRKNRICYLQEIFSNEMAKVDDSFFHRLEESFLVEEDKKHERHPIFGNIVDEVAYHEKYPTIYHLRKKLVDSTDKADLRLIYLALAHMIKFRGHFLIEGDLNPDNSDVDKLFIQLVQTYNQLFEENPINASGVDAKAILSARLSKSRRLENLIAQLPGEKKNGLFGNLIALSLGLTPNFKSNFDLAEDAKLQLSKDTYDDDLDNLLAQIGDQYADLFLAAKNLSDAILLSDILRVNTEITKAPLSASMIKRYDEHHQDLTLLKALVRQQLPEKYKEIFFDQSKNGYAGYIDGGASQEEFYKFIKPILEKMDGTEELLVKLNREDLLRKQRTFDNGSIPHQIHLGELHAILRRQEDFYPFLKDNREKIEKILTFRIPYYVGPLARGNSRFAWMTRKSEETITPWNFEEVVDKGASAQSFIERMTNFDKNLPNEKVLPKHSLLYEYFTVYNELTKVKYVTEGMRKPAFLSGEQKKAIVDLLFKTNRKVTVKQLKEDYFKKIECFDSVEISGVEDRFNASLGTYHDLLKIIKDKDFLDNEENEDILEDIVLTLTLFEDREMIEERLKTYAHLFDDKVMKQLKRRRYTGWGRLSRKLINGIRDKQSGKTILDFLKSDGFANRNFMQLIHDDSLTFKEDIQKAQVSGQGDSLHEHIANLAGSPAIKKGILQTVKVVDELVKVMGRHKPENIVIEMARENQTTQKGQKNSRERMKRIEEGIKELGSQILKEHPVENTQLQNEKLYLYYLQNGRDMYVDQELDINRLSDYDVDHIVPQSFLKDDSIDNKVLTRSDKARGKSDNVPSEEVVKKMKNYWRQLLNAKLITQRKFDNLTKAERGGLSELDKAGFIKRQLVETRQITKHVAQILDSRMNTKYDENDKLIREVKVITLKSKLVSDFRKDFQFYKVREINNYHHAHDAYLNAVVGTALIKKYPKLESEFVYGDYKVYDVRKMIAKSEQEIGKATAKYFFYSNIMNFFKTEITLANGEIRKRPLIETNGETGEIVWDKGRDFATVRKVLSMPQVNIVKKTEVQTGGFSKESILPKRNSDKLIARKKDWDPKKYGGFDSPTVAYSVLVVAKVEKGKSKKLKSVKELLGITIMERSSFEKNPIDFLEAKGYKEVKKDLIIKLPKYSLFELENGRKRMLASAGELQKGNELALPSKYVNFLYLASHYEKLKGSPEDNEQKQLFVEQHKHYLDEIIEQISEFSKRVILADANLDKVLSAYNKHRDKPIREQAENIIHLFTLTNLGAPAAFKYFDTTIDRKRYTSTKEVLDATLIHQSITGLYETRIDLSQLGGDGGSGGSSGGSSGSETPGTSESATPESSGGSSGGSSGGMDPLQLLQPLEAEIKGTKLKAHWNSGATITCVPEAFLEDERPIQTMLIKTIHGEKQQDVYYLTFKVQGRKVEAEVLASPYDYILLNPSDVPWLMKKPLQLTVLVPLHEYQERLLQQTALPKEQKELLQKLFLKYDALWQHWENQVGHRRIKPHNIATGTLAPRPQKQYPINPKAKPSIQIVIDDLLKQGVLIQQNSTMNTPVYPVPKPDGKWRMVLDYREVNKTIPLIAAQNQHSAGILSSIYRGKYKTTLDLTNGFWAHPITPESYWLTAFTWQGKQYCWTRLPQGFLNSPALFNADVVDLLKEIPNVQAYVDDIYISHDDPQEHLEQLEKIFSILLNAGYVVSLKKSEIAQREVEFLGFNITKEGRGLTDTFKQKLLNITPPKDLKQLQSILGKLNFARNFIPNYSELVKPLYTIVAPANGKFISWTEDNSNQLQHIISVLNQADNLEERNPETRLIIKVNSSPSAGYIRYYNEGSKRPIMYVNYIFSKAEAKFTQTEKLLTTMHKGLIKAMDLAMGQEILVYSPIVSMTKIQRTPLPERKALPVRWITWMTYLEDPRIQFHYDKSLPELQQIPNVTEDVIAKTKHPSEFAMVFYTDGSAIKHPDVNKSHSAGMGIAQVQFIPEYKIVHQWSIPLGDHTAQLAEIAAVEFACKKALKISGPVLIVTDSFYVAESANKELPYWKSNGFLNNKKKPLRHVSKWKSIAECLQLKPDIIIMHEKGHQQPMTTLHTEGNNLADKLATQGSYVVHAGKRTADGSEFEKRTADGSEFESPKKKAKVE

SEQ ID NO: 7739 - protein, 2109 aa, synthetic construct
MPAAKRVKLDGGDKKYSIGLDIGTNSVGWAVITDEYKVPSKKFKVLGNTDRHSIKKNLIGALLFDSGETAEATRLKRTARRRYTRRKNRICYLQEIFSNEMAKVDDSFFHRLEESFLVEEDKKHERHPIFGNIVDEVAYHEKYPTIYHLRKKLVDSTDKADLRLIYLALAHMIKFRGHFLIEGDLNPDNSDVDKLFIQLVQTYNQLFEENPINASGVDAKAILSARLSKSRRLENLIAQLPGEKKNGLFGNLIALSLGLTPNFKSNFDLAEDAKLQLSKDTYDDDLDNLLAQIGDQYADLFLAAKNLSDAILLSDILRVNTEITKAPLSASMIKRYDEHHQDLTLLKALVRQQLPEKYKEIFFDQSKNGYAGYIDGGASQEEFYKFIKPILEKMDGTEELLVKLNREDLLRKQRTFDNGSIPHQIHLGELHAILRRQEDFYPFLKDNREKIEKILTFRIPYYVGPLARGNSRFAWMTRKSEETITPWNFEEVVDKGASAQSFIERMTNFDKNLPNEKVLPKHSLLYEYFTVYNELTKVKYVTEGMRKPAFLSGEQKKAIVDLLFKTNRKVTVKQLKEDYFKKIECFDSVEISGVEDRFNASLGTYHDLLKIIKDKDFLDNEENEDILEDIVLTLTLFEDREMIEERLKTYAHLFDDKVMKQLKRRRYTGWGRLSRKLINGIRDKQSGKTILDFLKSDGFANRNFMQLIHDDSLTFKEDIQKAQVSGQGDSLHEHIANLAGSPAIKKGILQTVKVVDELVKVMGRHKPENIVIEMARENQTTQKGQKNSRERMKRIEEGIKELGSQILKEHPVENTQLQNEKLYLYYLQNGRDMYVDQELDINRLSDYDVDHIVPQSFLKDDSIDNKVLTRSDKARGKSDNVPSEEVVKKMKNYWRQLLNAKLITQRKFDNLTKAERGGLSELDKAGFIKRQLVETRQITKHVAQILDSRMNTKYDENDKLIREVKVITLKSKLVSDFRKDFQFYKVREINNYHHAHDAYLNAVVGTALIKKYPKLESEFVYGDYKVYDVRKMIAKSEQEIGKATAKYFFYSNIMNFFKTEITLANGEIRKRPLIETNGETGEIVWDKGRDFATVRKVLSMPQVNIVKKTEVQTGGFSKESILPKRNSDKLIARKKDWDPKKYGGFDSPTVAYSVLVVAKVEKGKSKKLKSVKELLGITIMERSSFEKNPIDFLEAKGYKEVKKDLIIKLPKYSLFELENGRKRMLASAGELQKGNELALPSKYVNFLYLASHYEKLKGSPEDNEQKQLFVEQHKHYLDEIIEQISEFSKRVILADANLDKVLSAYNKHRDKPIREQAENIIHLFTLTNLGAPAAFKYFDTTIDRKRYTSTKEVLDATLIHQSITGLYETRIDLSQLGGDGGSGGSSGGSSGSETPGTSESATPESSGGSSGGSSGGIPWLMKKPLQLTTLVPLQEYEERLLKQTMLTGSYKEKLQSLFLKYDALWQHWENQVGHRRIKPHHIATGTVNPRPQKQYPINPKAKASIQTVINDLLKQGVLIQQNSIMNTPVYPVPKPDGKWRMVLDYREVNKTIPLIAAQNQHSAGILSSIFRGKYKTTLDLSNGFWAHSITPESYWLTAFTWLGQQYCWTRLPQGFLNSPALFNADVVDLLKEVPNVQVYVDDIYISHDDPREHLEQLEKVFSLLLNAGYVVSLKKSEIAQHEVEFLGFNITKEGRGLTETFKQKLLNITPPRDLKQLQSILGLLNFARNFIPNFSELVKPLYNIIATAPGKYITWTTDNSQQLQNIISMLNSAENLEERNPEVRLIMKVNTSPSAGYIRFYNEFAKRPIMYLNYVYTKAEVKFTNTEKLLTTIHKGLIKALDLGMGQEILVYSPIVSMTKIQKTPLPERKALPIRWITWMSYLEDPRIQFHYDKTLPELQQVPTVTDDIIAKIKHPSEFSMVFYTDGSAIKHPNVNKSHNAGMGIAQVQFKPEFTVINTWSIPLGDHTAQLAEVAAVEFACKKALKIDGPVLIVTDSFYVAESVNKELPYWQSNGFFNNKKKPLKHVSKWKSIADCIQLKPDIIIIHEKGHQPTASTFHTEGNNLADKLATQGSYVVNAGKRTADGSEFEKRTADGSEFESPKKKAKVE

SEQ ID NO: 7740 - protein, 2198 aa, synthetic construct
MPAAKRVKLDGGDKKYSIGLDIGTNSVGWAVITDEYKVPSKKFKVLGNTDRHSIKKNLIGALLFDSGETAEATRLKRTARRRYTRRKNRICYLQEIFSNEMAKVDDSFFHRLEESFLVEEDKKHERHPIFGNIVDEVAYHEKYPTIYHLRKKLVDSTDKADLRLIYLALAHMIKFRGHFLIEGDLNPDNSDVDKLFIQLVQTYNQLFEENPINASGVDAKAILSARLSKSRRLENLIAQLPGEKKNGLFGNLIALSLGLTPNFKSNFDLAEDAKLQLSKDTYDDDLDNLLAQIGDQYADLFLAAKNLSDAILLSDILRVNTEITKAPLSASMIKRYDEHHQDLTLLKALVRQQLPEKYKEIFFDQSKNGYAGYIDGGASQEEFYKFIKPILEKMDGTEELLVKLNREDLLRKQRTFDNGSIPHQIHLGELHAILRRQEDFYPFLKDNREKIEKILTFRIPYYVGPLARGNSRFAWMTRKSEETITPWNFEEVVDKGASAQSFIERMTNFDKNLPNEKVLPKHSLLYEYFTVYNELTKVKYVTEGMRKPAFLSGEQKKAIVDLLFKTNRKVTVKQLKEDYFKKIECFDSVEISGVEDRFNASLGTYHDLLKIIKDKDFLDNEENEDILEDIVLTLTLFEDREMIEERLKTYAHLFDDKVMKQLKRRRYTGWGRLSRKLINGIRDKQSGKTILDFLKSDGFANRNFMQLIHDDSLTFKEDIQKAQVSGQGDSLHEHIANLAGSPAIKKGILQTVKVVDELVKVMGRHKPENIVIEMARENQTTQKGQKNSRERMKRIEEGIKELGSQILKEHPVENTQLQNEKLYLYYLQNGRDMYVDQELDINRLSDYDVDHIVPQSFLKDDSIDNKVLTRSDKARGKSDNVPSEEVVKKMKNYWRQLLNAKLITQRKFDNLTKAERGGLSELDKAGFIKRQLVETRQITKHVAQILDSRMNTKYDENDKLIREVKVITLKSKLVSDFRKDFQFYKVREINNYHHAHDAYLNAVVGTALIKKYPKLESEFVYGDYKVYDVRKMIAKSEQEIGKATAKYFFYSNIMNFFKTEITLANGEIRKRPLIETNGETGEIVWDKGRDFATVRKVLSMPQVNIVKKTEVQTGGFSKESILPKRNSDKLIARKKDWDPKKYGGFDSPTVAYSVLVVAKVEKGKSKKLKSVKELLGITIMERSSFEKNPIDFLEAKGYKEVKKDLIIKLPKYSLFELENGRKRMLASAGELQKGNELALPSKYVNFLYLASHYEKLKGSPEDNEQKQLFVEQHKHYLDEIIEQISEFSKRVILADANLDKVLSAYNKHRDKPIREQAENIIHLFTLTNLGAPAAFKYFDTTIDRKRYTSTKEVLDATLIHQSITGLYETRIDLSQLGGDGGSGGSSGGSSGSETPGTSESATPESSGGSSGGSSGGMDPLQLLQPLEAEIKGTKLKAHWNSGATITCVPQAFLEEEVPIKNIWIKTIHGEKEQPVYYLTFKIQGRKVEAEVISSPYDYILVSPSDIPWLMKKPLQLTTLVPLQEYEERLLKQTMLTGSYKEKLQSLFLKYDALWQHWENQVGHRRIKPHHIATGTVNPRPQKQYPINPKAKASIQTVINDLLKQGVLIQQNSIMNTPVYPVPKPDGKWRMVLDYREVNKTIPLIAAQNQHSAGILSSIFRGKYKTTLDLSNGFWAHSITPESYWLTAFTWLGQQYCWTRLPQGFLNSPALFNADVVDLLKEVPNVQVYVDDIYISHDDPREHLEQLEKVFSLLLNAGYVVSLKKSEIAQHEVEFLGFNITKEGRGLTETFKQKLLNITPPRDLKQLQSILGLLNFARNFIPNFSELVKPLYNIIATAPGKYITWTTDNSQQLQNIISMLNSAENLEERNPEVRLIMKVNTSPSAGYIRFYNEFAKRPIMYLNYVYTKAEVKFTNTEKLLTTIHKGLIKALDLGMGQEILVYSPIVSMTKIQKTPLPERKALPIRWITWMSYLEDPRIQFHYDKTLPELQQVPTVTDDIIAKIKHPSEFSMVFYTDGSAIKHPNVNKSHNAGMGIAQVQFKPEFTVINTWSIPLGDHTAQLAEVAAVEFACKKALKIDGPVLIVTDSFYVAESVNKELPYWQSNGFFNNKKKPLKHVSKWKSIADCIQLKPDIIIIHEKGHQPTASTFHTEGNNLADKLATQGSYVVNAGKRTADGSEFEKRTADGSEFESPKKKAKVE

SEQ ID NO: 7741 - protein, 2116 aa, synthetic construct
MPAAKRVKLDGGDKKYSIGLDIGTNSVGWAVITDEYKVPSKKFKVLGNTDRHSIKKNLIGALLFDSGETAEATRLKRTARRRYTRRKNRICYLQEIFSNEMAKVDDSFFHRLEESFLVEEDKKHERHPIFGNIVDEVAYHEKYPTIYHLRKKLVDSTDKADLRLIYLALAHMIKFRGHFLIEGDLNPDNSDVDKLFIQLVQTYNQLFEENPINASGVDAKAILSARLSKSRRLENLIAQLPGEKKNGLFGNLIALSLGLTPNFKSNFDLAEDAKLQLSKDTYDDDLDNLLAQIGDQYADLFLAAKNLSDAILLSDILRVNTEITKAPLSASMIKRYDEHHQDLTLLKALVRQQLPEKYKEIFFDQSKNGYAGYIDGGASQEEFYKFIKPILEKMDGTEELLVKLNREDLLRKQRTFDNGSIPHQIHLGELHAILRRQEDFYPFLKDNREKIEKILTFRIPYYVGPLARGNSRFAWMTRKSEETITPWNFEEVVDKGASAQSFIERMTNFDKNLPNEKVLPKHSLLYEYFTVYNELTKVKYVTEGMRKPAFLSGEQKKAIVDLLFKTNRKVTVKQLKEDYFKKIECFDSVEISGVEDRFNASLGTYHDLLKIIKDKDFLDNEENEDILEDIVLTLTLFEDREMIEERLKTYAHLFDDKVMKQLKRRRYTGWGRLSRKLINGIRDKQSGKTILDFLKSDGFANRNFMQLIHDDSLTFKEDIQKAQVSGQGDSLHEHIANLAGSPAIKKGILQTVKVVDELVKVMGRHKPENIVIEMARENQTTQKGQKNSRERMKRIEEGIKELGSQILKEHPVENTQLQNEKLYLYYLQNGRDMYVDQELDINRLSDYDVDHIVPQSFLKDDSIDNKVLTRSDKARGKSDNVPSEEVVKKMKNYWRQLLNAKLITQRKFDNLTKAERGGLSELDKAGFIKRQLVETRQITKHVAQILDSRMNTKYDENDKLIREVKVITLKSKLVSDFRKDFQFYKVREINNYHHAHDAYLNAVVGTALIKKYPKLESEFVYGDYKVYDVRKMIAKSEQEIGKATAKYFFYSNIMNFFKTEITLANGEIRKRPLIETNGETGEIVWDKGRDFATVRKVLSMPQVNIVKKTEVQTGGFSKESILPKRNSDKLIARKKDWDPKKYGGFDSPTVAYSVLVVAKVEKGKSKKLKSVKELLGITIMERSSFEKNPIDFLEAKGYKEVKKDLIIKLPKYSLFELENGRKRMLASAGELQKGNELALPSKYVNFLYLASHYEKLKGSPEDNEQKQLFVEQHKHYLDEIIEQISEFSKRVILADANLDKVLSAYNKHRDKPIREQAENIIHLFTLTNLGAPAAFKYFDTTIDRKRYTSTKEVLDATLIHQSITGLYETRIDLSQLGGDGGSGGSSGGSSGSETPGTSESATPESSGGSSGGSSGGVLNLEEEYRLHEKPVPSSIDPSWLQLFPTVWAERAGMGLANQVPPVVVELRSGASPVAVRQYPMSKEAREGIRPHIQRFLDLGVLVPCQSPWNTPLLPVKKPGTNDYRPVQDLREINKRVQDIHPTVPNPYNLLSSLPPSHTWYSVLDLKDAFFCLKLHPNSQPLFAFEWRDPEKGNTGQLTWTRLPQGFKNSPTLFDEALHRDLAPFRALNPQVVLLQYVDDLLVAAPTYRDCKEGTQKLLQELSKLGYRVSAKKAQLCQKEVTYLGYLLKEGKRWLTPARKATVMKIPPPTTPRQVREFLGTAGFCRLWIPGFASLAAPLYPLTKESIPFIWTEEHQKAFDRIKEALLSAPALALPDLTKPFTLYVDERAGVARGVLTQTLGPWRRPVAYLSKKLDPVASGWPTCLKAVAAVALLLKDADKLTLGQNVTVIASHSLESIVRQPPDRWMTNARMTHYQSLLLNERVSFAPPAVLNPATLLPVESEATPVHRCSEILAEETGTRRDLKDQPLPGVPAWYTDGSSFIAEGKRRAGAAIVDGKRTVWASSLPEGTSAQKAELVALTQALRLAEGKDINIYTDSRYAFATAHIHGAIYKQRGLLTSAGKDIKNKEEILALLEAIHLPKRVAIIHCPGHQKGNDPVATGNRRADEAAKQAALSTRVLAETTKPAGKRTADGSEFEKRTADGSEFESPKKKAKVE

SEQ ID NO: 7742 - protein, 2116 aa, synthetic construct
MPAAKRVKLDGGDKKYSIGLDIGTNSVGWAVITDEYKVPSKKFKVLGNTDRHSIKKNLIGALLFDSGETAEATRLKRTARRRYTRRKNRICYLQEIFSNEMAKVDDSFFHRLEESFLVEEDKKHERHPIFGNIVDEVAYHEKYPTIYHLRKKLVDSTDKADLRLIYLALAHMIKFRGHFLIEGDLNPDNSDVDKLFIQLVQTYNQLFEENPINASGVDAKAILSARLSKSRRLENLIAQLPGEKKNGLFGNLIALSLGLTPNFKSNFDLAEDAKLQLSKDTYDDDLDNLLAQIGDQYADLFLAAKNLSDAILLSDILRVNTEITKAPLSASMIKRYDEHHQDLTLLKALVRQQLPEKYKEIFFDQSKNGYAGYIDGGASQEEFYKFIKPILEKMDGTEELLVKLNREDLLRKQRTFDNGSIPHQIHLGELHAILRRQEDFYPFLKDNREKIEKILTFRIPYYVGPLARGNSRFAWMTRKSEETITPWNFEEVVDKGASAQSFIERMTNFDKNLPNEKVLPKHSLLYEYFTVYNELTKVKYVTEGMRKPAFLSGEQKKAIVDLLFKTNRKVTVKQLKEDYFKKIECFDSVEISGVEDRFNASLGTYHDLLKIIKDKDFLDNEENEDILEDIVLTLTLFEDREMIEERLKTYAHLFDDKVMKQLKRRRYTGWGRLSRKLINGIRDKQSGKTILDFLKSDGFANRNFMQLIHDDSLTFKEDIQKAQVSGQGDSLHEHIANLAGSPAIKKGILQTVKVVDELVKVMGRHKPENIVIEMARENQTTQKGQKNSRERMKRIEEGIKELGSQILKEHPVENTQLQNEKLYLYYLQNGRDMYVDQELDINRLSDYDVDHIVPQSFLKDDSIDNKVLTRSDKARGKSDNVPSEEVVKKMKNYWRQLLNAKLITQRKFDNLTKAERGGLSELDKAGFIKRQLVETRQITKHVAQILDSRMNTKYDENDKLIREVKVITLKSKLVSDFRKDFQFYKVREINNYHHAHDAYLNAVVGTALIKKYPKLESEFVYGDYKVYDVRKMIAKSEQEIGKATAKYFFYSNIMNFFKTEITLANGEIRKRPLIETNGETGEIVWDKGRDFATVRKVLSMPQVNIVKKTEVQTGGFSKESILPKRNSDKLIARKKDWDPKKYGGFDSPTVAYSVLVVAKVEKGKSKKLKSVKELLGITIMERSSFEKNPIDFLEAKGYKEVKKDLIIKLPKYSLFELENGRKRMLASAGELQKGNELALPSKYVNFLYLASHYEKLKGSPEDNEQKQLFVEQHKHYLDEIIEQISEFSKRVILADANLDKVLSAYNKHRDKPIREQAENIIHLFTLTNLGAPAAFKYFDTTIDRKRYTSTKEVLDATLIHQSITGLYETRIDLSQLGGDGGSGGSSGGSSGSETPGTSESATPESSGGSSGGSSGGVLNLEEEYRLHEKPVPSSIDPSWLQLFPTVWAERAGMGLANQVPPVVVELRSGASPVAVRQYPMSKEAREGIRPHIQRFLDLGVLVPCQSPWNTPLLPVKKPGTNDYRPVQDLREINKRVQDIHPTVPNPYNLLSSLPPSHTWYSVLDLKDAFFCLKLHPNSQPLFAFEWRDPEKGNTGQLTWTRLPQGFKNSPTLFNEALHRDLAPFRALNPQVVLLQYVDDLLVAAPTYRDCKEGTQKLLQELSKLGYRVSAKKAQLCQKEVTYLGYLLKEGKRWLTPARKATVMKIPPPTTPRQVREFLGTAGFCRLWIPGFASLAAPLYPLTKPSIPFIWTEEHQKAFDRIKEALLSAPALALPDLTKPFTLYVDERAGVARGVLTQTLGPWRRPVAYLSKKLDPVASGWPTCLKAVAAVALLLKDADKLTLGQNVTVIASHSLESIVRQPPDRWMTNARMTHYQSLLLNERVSFAPPAVLNPATLLPVESEATPVHRCSEILAEETGTRRDLKDQPLPGVPAWYTDGSSFIAEGKRRAGAAIVDGKRTVWASSLPEGTSAQKAELVALTQALRLAEGKDINIYTDSRYAFATAHIHGAIYKQRGWLTSAGKDIKNKEEILALLEAIHLPKRVAIIHCPGHQKGNDPVATGNRRADEAAKQAALSTRVLAETTKPAGKRTADGSEFEKRTADGSEFESPKKKAKVE

SEQ ID NO: 7743 - protein, 2116 aa, synthetic construct
MPAAKRVKLDGGDKKYSIGLDIGTNSVGWAVITDEYKVPSKKFKVLGNTDRHSIKKNLIGALLFDSGETAEATRLKRTARRRYTRRKNRICYLQEIFSNEMAKVDDSFFHRLEESFLVEEDKKHERHPIFGNIVDEVAYHEKYPTIYHLRKKLVDSTDKADLRLIYLALAHMIKFRGHFLIEGDLNPDNSDVDKLFIQLVQTYNQLFEENPINASGVDAKAILSARLSKSRRLENLIAQLPGEKKNGLFGNLIALSLGLTPNFKSNFDLAEDAKLQLSKDTYDDDLDNLLAQIGDQYADLFLAAKNLSDAILLSDILRVNTEITKAPLSASMIKRYDEHHQDLTLLKALVRQQLPEKYKEIFFDQSKNGYAGYIDGGASQEEFYKFIKPILEKMDGTEELLVKLNREDLLRKQRTFDNGSIPHQIHLGELHAILRRQEDFYPFLKDNREKIEKILTFRIPYYVGPLARGNSRFAWMTRKSEETITPWNFEEVVDKGASAQSFIERMTNFDKNLPNEKVLPKHSLLYEYFTVYNELTKVKYVTEGMRKPAFLSGEQKKAIVDLLFKTNRKVTVKQLKEDYFKKIECFDSVEISGVEDRFNASLGTYHDLLKIIKDKDFLDNEENEDILEDIVLTLTLFEDREMIEERLKTYAHLFDDKVMKQLKRRRYTGWGRLSRKLINGIRDKQSGKTILDFLKSDGFANRNFMQLIHDDSLTFKEDIQKAQVSGQGDSLHEHIANLAGSPAIKKGILQTVKVVDELVKVMGRHKPENIVIEMARENQTTQKGQKNSRERMKRIEEGIKELGSQILKEHPVENTQLQNEKLYLYYLQNGRDMYVDQELDINRLSDYDVDHIVPQSFLKDDSIDNKVLTRSDKARGKSDNVPSEEVVKKMKNYWRQLLNAKLITQRKFDNLTKAERGGLSELDKAGFIKRQLVETRQITKHVAQILDSRMNTKYDENDKLIREVKVITLKSKLVSDFRKDFQFYKVREINNYHHAHDAYLNAVVGTALIKKYPKLESEFVYGDYKVYDVRKMIAKSEQEIGKATAKYFFYSNIMNFFKTEITLANGEIRKRPLIETNGETGEIVWDKGRDFATVRKVLSMPQVNIVKKTEVQTGGFSKESILPKRNSDKLIARKKDWDPKKYGGFDSPTVAYSVLVVAKVEKGKSKKLKSVKELLGITIMERSSFEKNPIDFLEAKGYKEVKKDLIIKLPKYSLFELENGRKRMLASAGELQKGNELALPSKYVNFLYLASHYEKLKGSPEDNEQKQLFVEQHKHYLDEIIEQISEFSKRVILADANLDKVLSAYNKHRDKPIREQAENIIHLFTLTNLGAPAAFKYFDTTIDRKRYTSTKEVLDATLIHQSITGLYETRIDLSQLGGDGGSGGSSGGSSGSETPGTSESATPESSGGSSGGSSGGVLNLEEEYRLHEKPVPSSIDPSWLQLFPTVWAERAGMGLANQVPPVVVELRSGASPVAVRQYPMSKEAREGIRPHIQRFLDLGVLVPCQSPWNTPLLPVKKPGTNDYRPVQDLREINKRVQDIHPTVPNPYNLLSSLPPSHTWYSVLDLKDAFFCLKLHPNSQPLFAFEWRDPEKGNTGQLTWTRLPQGFKNSPTLFNEALHRDLAPFRALNPQVVLLQYVDDLLVAAPTYRDCKEGTQKLLQELSKLGYRVSAKKAQLCQKEVTYLGYLLKEGKRWLTPARKATVMKIPPPTTPRQVREFLGKAGFCRLFIPGFASLAAPLYPLTKPSIPFIWTEEHQKAFDRIKEALLSAPALALPDLTKPFTLYVDERAGVARGVLTQTLGPWRRPVAYLSKKLDPVASGWPTCLKAVAAVALLLKDADKLTLGQNVTVIASHSLESIVRQPPDRWMTNARMTHYQSLLLNERVSFAPPAVLNPATLLPVESEATPVHRCSEILAEETGTRRDLKDQPLPGVPAWYTDGSSFIAEGKRRAGAAIVDGKRTVWASSLPEGTSAQKAELVALTQALRLAEGKDINIYTDSRYAFATAHIHGAIYKQRGWLTSAGKDIKNKEEILALLEAIHLPKRVAIIHCPGHQKGNDPVATGNRRADEAAKQAALSTRVLAETTKPAGKRTADGSEFEKRTADGSEFESPKKKAKVE

SEQ ID NO: 7744-8000 - skipped (257 entries)

SEQ ID NO: 8001 - protein, 673 aa, Reticuloendotheliosis virus
TAPLEEEYRLFLEAPIQNVTLLEQWKREIPKVWAEINPPGLASTQAPIHVQLLSTALPVRVRQYPITLEAKRSLRETIRKFRAAGILRPVHSPWNTPLLPVRKSGTSEYRMVQDLREVNKRVETIHPTVPNPYTLLSLLPPDRIWYSVLDLKDAFFCIPLAPESQLIFAFEWADAEEGESGQLTWTRLPQGFKNSPTLFDEALNRDLQGFRLDHPSVSLLQYVDDLLIAADTQAACLSATRDLLMTLAELGYRVSGKKAQLCQEEVTYLGFKIHKGSRSLSNSRTQAILQIPVPKTKRQVREFLGTIGYCRLWIPGFAELAQPLYAATRGGNDPLVWGEKEEEAFQSLKLALTQPPALALPSLDKPFQLFVEETSGAAKGVLTQALGPWKRPVAYLSKRLDPVAAGWPRCLRAIAAAALLTREASKLTFGQDIEITSSHNLESLLRSPPDKWLTNARITQYQVLLLDPPRVRFKQTAALNPATLLPETDDTLPIHHCLDTLDSLTSTRPDLTDQPLAQAEATLFTDGSSYIRDGKRYAGAAVVTLDSVIWAEPLPIGTSAQKAELIALTKALEWSKDKSVNIYTDSRYAFATLHVHGMIYRERGLLTAGGKAIKNAPEILALLTAVWLPKRVAVMHCKGHQKDDAPTSTGNRRADEVAREVAIRPLSTQATIS

SEQ ID NO: 8002 - protein, 673 aa, synthetic construct
TAPLEEEYRLFLEAPIQNVTLLEQWKREIPKVWAEINPPGLASTQAPIHVQLLSTALPVRVRQYPITLEAKRSLRETIRKFRAAGILRPVHSPWNTPLLPVRKSGTSEYRMVQDLREVNKRVETIHPTVPNPYTLLSLLPPDRIWYSVLDLKDAFFCIPLAPESQLIFAFEWADAEEGESGQLTWTRLPQGFKNSPTLFNEALNRDLQGFRLDHPSVSLLQYVDDLLIAADTQAACLSATRDLLMTLAELGYRVSGKKAQLCQEEVTYLGFKIHKGSRSLSNSRTQAILQIPVPKTKRQVREFLGTIGYCRLWIPGFAELAQPLYAATRPGNDPLVWGEKEEEAFQSLKLALTQPPALALPSLDKPFQLFVEETSGAAKGVLTQALGPWKRPVAYLSKRLDPVAAGWPRCLRAIAAAALLTREASKLTFGQDIEITSSHNLESLLRSPPDKWLTNARITQYQVLLLDPPRVRFKQTAALNPATLLPETDDTLPIHHCLDTLDSLTSTRPDLTDQPLAQAEATLFTDGSSYIRDGKRYAGAAVVTLDSVIWAEPLPIGTSAQKAELIALTKALEWSKDKSVNIYTDSRYAFATLHVHGMIYRERGWLTAGGKAIKNAPEILALLTAVWLPKRVAVMHCKGHQKDDAPTSTGNRRADEVAREVAIRPLSTQATIS

SEQ ID NO: 8003 - protein, 673 aa, synthetic construct
TAPLEEEYRLFLEAPIQNVTLLEQWKREIPKVWAEINPPGLASTQAPIHVQLLSTALPVRVRQYPITLEAKRSLRETIRKFRAAGILRPVHSPWNTPLLPVRKSGTSEYRMVQDLREVNKRVETIHPTVPNPYTLLSLLPPDRIWYSVLDLKDAFFCIPLAPESQLIFAFEWADAEEGESGQLTWTRLPQGFKNSPTLFNEALNRDLQGFRLDHPSVSLLQYVDDLLIAADTQAACLSATRDLLMTLAELGYRVSGKKAQLCQEEVTYLGFKIHKGSRSLSNSRTQAILQIPVPKTKRQVREFLGKIGYCRLFIPGFAELAQPLYAATRPGNDPLVWGEKEEEAFQSLKLALTQPPALALPSLDKPFQLFVEETSGAAKGVLTQALGPWKRPVAYLSKRLDPVAAGWPRCLRAIAAAALLTREASKLTFGQDIEITSSHNLESLLRSPPDKWLTNARITQYQVLLLDPPRVRFKQTAALNPATLLPETDDTLPIHHCLDTLDSLTSTRPDLTDQPLAQAEATLFTDGSSYIRDGKRYAGAAVVTLDSVIWAEPLPIGTSAQKAELIALTKALEWSKDKSVNIYTDSRYAFATLHVHGMIYRERGWLTAGGKAIKNAPEILALLTAVWLPKRVAVMHCKGHQKDDAPTSTGNRRADEVAREVAIRPLSTQATIS

SEQ ID NO: 8004 - protein, 677 aa, Baboon endogenous virus
TVSLQDEHRLFDIPVTTSLPDVWLQDFPQAWAETGGLGRAKCQAPIIIDLKPTAVPVSIKQYPMSLEAHMGIRQHIIKFLELGVLRPCRSPWNTPLLPVKKPGTQDYRPVQDLREINKRTVDIHPTVPNPYNLLSTLKPDYSWYTVLDLKDAFFCLPLAPQSQELFAFEWKDPERGISGQLTWTRLPQGFKNSPTLFDEALHRDLTDFRTQHPEVTLLQYVDDLLLAAPTKKACTQGTRHLLQELGEKGYRASAKKAQICQTKVTYLGYILSEGKRWLTPGRIETVARIPPPRNPREVREFLGTAGFCRLWIPGFAELAAPLYALTKESTPFTWQTEHQLAFEALKKALLSAPALGLPDTSKPFTLFLDERQGIAKGVLTQKLGPWKRPVAYLSKKLDPVAAGWPPCLRIMAATAMLVKDSAKLTLGQPLTVITPHTLEAIVRQPPDRWITNARLTHYQALLLDTDRVQFGPPVTLNPATLLPVPENQPSPHDCRQVLAETHGTREDLKDQELPDADHTWYTDGSSYLDSGTRRAGAAVVDGHNTIWAQSLPPGTSAQKAELIALTKALELSKGKKANIYTDSRYAFATAHTHGSIYERRGLLTSEGKEIKNKAEIIALLKALFLPQEVAIIHCPGHQKGQDPVAVGNRQADRVARQAAMAEVLTLATEPDNTSHIT

SEQ ID NO: 8005 - protein, 677 aa, synthetic construct
TVSLQDEHRLFDIPVTTSLPDVWLQDFPQAWAETGGLGRAKCQAPIIIDLKPTAVPVSIKQYPMSLEAHMGIRQHIIKFLELGVLRPCRSPWNTPLLPVKKPGTQDYRPVQDLREINKRTVDIHPTVPNPYNLLSTLKPDYSWYTVLDLKDAFFCLPLAPQSQELFAFEWKDPERGISGQLTWTRLPQGFKNSPTLFNEALHRDLTDFRTQHPEVTLLQYVDDLLLAAPTKKACTQGTRHLLQELGEKGYRASAKKAQICQTKVTYLGYILSEGKRWLTPGRIETVARIPPPRNPREVREFLGTAGFCRLWIPGFAELAAPLYALTKPSTPFTWQTEHQLAFEALKKALLSAPALGLPDTSKPFTLFLDERQGIAKGVLTQKLGPWKRPVAYLSKKLDPVAAGWPPCLRIMAATAMLVKDSAKLTLGQPLTVITPHTLEAIVRQPPDRWITNARLTHYQALLLDTDRVQFGPPVTLNPATLLPVPENQPSPHDCRQVLAETHGTREDLKDQELPDADHTWYTDGSSYLDSGTRRAGAAVVDGHNTIWAQSLPPGTSAQKAELIALTKALELSKGKKANIYTDSRYAFATAHTHGSIYERRGWLTSEGKEIKNKAEIIALLKALFLPQEVAIIHCPGHQKGQDPVAVGNRQADRVARQAAMAEVLTLATEPDNTSHIT

SEQ ID NO: 8006 - protein, 677 aa, synthetic construct
TVSLQDEHRLFDIPVTTSLPDVWLQDFPQAWAETGGLGRAKCQAPIIIDLKPTAVPVSIKQYPMSLEAHMGIRQHIIKFLELGVLRPCRSPWNTPLLPVKKPGTQDYRPVQDLREINKRTVDIHPTVPNPYNLLSTLKPDYSWYTVLDLKDAFFCLPLAPQSQELFAFEWKDPERGISGQLTWTRLPQGFKNSPTLFNEALHRDLTDFRTQHPEVTLLQYVDDLLLAAPTKKACTQGTRHLLQELGEKGYRASAKKAQICQTKVTYLGYILSEGKRWLTPGRIETVARIPPPRNPREVREFLGKAGFCRLFIPGFAELAAPLYALTKPSTPFTWQTEHQLAFEALKKALLSAPALGLPDTSKPFTLFLDERQGIAKGVLTQKLGPWKRPVAYLSKKLDPVAAGWPPCLRIMAATAMLVKDSAKLTLGQPLTVITPHTLEAIVRQPPDRWITNARLTHYQALLLDTDRVQFGPPVTLNPATLLPVPENQPSPHDCRQVLAETHGTREDLKDQELPDADHTWYTDGSSYLDSGTRRAGAAVVDGHNTIWAQSLPPGTSAQKAELIALTKALELSKGKKANIYTDSRYAFATAHTHGSIYERRGWLTSEGKEIKNKAEIIALLKALFLPQEVAIIHCPGHQKGQDPVAVGNRQADRVARQAAMAEVLTLATEPDNTSHIT

SEQ ID NO: 8007 - protein, 576 aa, Bovine leukemia virus
GVLDAPPSHIGLEHLPPPPEVPQFPLNLERLQALQDLVHRSLEAGYISPWDGPGNNPVFPVRKPNGAWRFVHDLRVTNALTKPIPALSPGPPDLTAIPTHLPHIICLDLKDAFFQIPVEDRFRSYFAFTLPTPGGLQPHRRFAWRVLPQGFINSPALFERALQEPLRQVSAAFSQSLLVSYMDDILYVSPTEEQRLQCYQTMAAHLRDLGFQVASEKTRQTPSPVPFLGQMVHERMVTYQSLPTLQISSPISLHQLQTVLGDLQWVSRGTPTTRRPLQLLYSSLKGIDDPRAIIHLSPEQQQGIAELRQALSHNARSRYNEQEPLLAYVHLTRAGSTLVLFQKGAQFPLAYFQTPLTDNQASPWGLLLLLGCQYLQAQALSSYAKTILKYYHNLPKTSLDNWIQSSEDPRVQELLQLWPQISSQGIQPPGPWKTLVTRAEVFLTPQFSPEPIPAALCLFSDGAARRGAYCLWKDHLLDFQAVPAPESAQKGELAGLLAGLAAAPPEPLNIWVDSKYLYSLLRTLVLGAWLQPDPVPSYALLYKSLLRHPAIFVGHVRSHSSASHPIASLNNYVDQL

SEQ ID NO: 8008 - protein, 576 aa, synthetic construct
GVLDAPPSHIGLEHLPPPPEVPQFPLNLERLQALQDLVHRSLEAGYISPWDGPGNNPVFPVRKPNGAWRFVHDLRVTNALTKPIPALSPGPPDLTAIPTHLPHIICLDLKDAFFQIPVEDRFRSYFAFTLPTPGGLQPHRRFAWRVLPQGFINSPALFQRALQEPLRQVSAAFSQSLLVSYMDDILYVSPTEEQRLQCYQTMAAHLRDLGFQVASEKTRQTPSPVPFLGQMVHERMVTYQSLPTLQISSPISLHQLQTVLGDLQWVSRGTPTTRRPLQLLYSSLKPIDDPRAIIHLSPEQQQGIAELRQALSHNARSRYNEQEPLLAYVHLTRAGSTLVLFQKGAQFPLAYFQTPLTDNQASPWGLLLLLGCQYLQAQALSSYAKTILKYYHNLPKTSLDNWIQSSEDPRVQELLQLWPQISSQGIQPPGPWKTLVTRAEVFLTPQFSPEPIPAALCLFSDGAARRGAYCLWKDHLLDFQAVPAPESAQKGELAGLLAGLAAAPPEPLNIWVDSKYLYSLLRTLVLGAWLQPDPVPSYALLYKSLLRHPAIFVGHVRSHSSASHPIASLNNYVDQL

SEQ ID NO: 8009 - protein, 576 aa, Bovine leukemia virus
GVLDTPPSHIGLEHLPPPPEVPQFPLNLERLQALQDLVHRSLEAGYISPWDGPGNNPVFPVRKPNGAWRFVHDLRATNALTKPIPALSPGPPDLTAIPTHPPHIICLDLKDAFFQIPVEDRFRFYLSFTLPSPGGLQPHRRFAWRVLPQGFINSPALFERALQEPLRQVSAAFSQSLLVSYMDDILYASPTEEQRSQCYQALAARLRDLGFQVASEKTSQTPSPVPFLGQMVHEQIVTYQSLPTLQISSPISLHQLQAVLGDLQWVSRGTPTTRRPLQLLYSSLKRHHDPRAIIQLSPEQLQGIAELRQALSHNARSRYNEQEPLLAYVHLTRAGSTLVLFQKGAQFPLAYFQTPLTDNQASPWGLLLLLGCQYLQTQALSSYAKPILKYYHNLPKTSLDNWIQSSEDPRVQELLQLWPQISSQGIQPPGPWKTLITRAEVFLTPQFSPDPIPAALCLFSDGATGRGAYCLWKDHLLDFQAVPAPESAQKGELAGLLAGLAAAPPEPVNIWVDSKYLYSLLRTLVLGAWLQPDPVPSYALLYKSLLRHPAIVVGHVRSHSSASHPIASLNNYVDQL

SEQ ID NO: 8010 - protein, 576 aa, synthetic construct
GVLDTPPSHIGLEHLPPPPEVPQFPLNLERLQALQDLVHRSLEAGYISPWDGPGNNPVFPVRKPNGAWRFVHDLRATNALTKPIPALSPGPPDLTAIPTHPPHIICLDLKDAFFQIPVEDRFRFYLSFTLPSPGGLQPHRRFAWRVLPQGFINSPALFNRALQEPLRQVSAAFSQSLLVSYMDDILYASPTEEQRSQCYQALAARLRDLGFQVASEKTSQTPSPVPFLGQMVHEQIVTYQSLPTLQISSPISLHQLQAVLGDLQWVSRGTPTTRRPLQLLYSSLKRHHDPRAIIQLSPEQLQGIAELRQALSHNARSRYNEQEPLLAYVHLTRAGSTLVLFQKGAQFPLAYFQTPLTDNQASPWGLLLLLGCQYLQTQALSSYAKPILKYYHNLPKTSLDNWIQSSEDPRVQELLQLWPQISSQGIQPPGPWKTLITRAEVFLTPQFSPDPIPAALCLFSDGATGRGAYCLWKDHLLDFQAVPAPESAQKGELAGLLAGLAAAPPEPVNIWVDSKYLYSLLRTWVLGAWLQPDPVPSYALLYKSLLRHPAIVVGHVRSHSSASHPIASLNNYVDQL

SEQ ID NO: 8011 - protein, 576 aa, synthetic construct
GVLDTPPSHIGLEHLPPPPEVPQFPLNLERLQALQDLVHRSLEAGYISPWDGPGNNPVFPVRKPNGAWRFVHDLRATNALTKPIPALSPGPPDLTAPPTHPPHIICLDLKDAFFQIPVEDRFRFYLSFTLPSPGGLQPHRRFAWRVLPQGFINSPALFQRALQEPLRQVSAAFSQSLLVSYMDDILYASPTEEQRSQCYQALAARLRDLGFQVASEKTSQTPSPVPFLGQMVHEQIVTYQSLPTLQISSPISLHQLQAVLGDLQWVSRGTPTTRRPLQLLYSSLKRHHDPRAIIQLSPEQLQGIAELRQALSHNARSRYNEQEPLLAYVHLTRAGSTLVLFQKGAQFPLAYFQTPLTDNQASPWGLLLLLGCQYLQTQALSSYAKPILKYYHNLPKTSLDNWIQSSEDPRVQELLQLWPQISSQGIQPPGPWKTLITRAEVFLTPQFSPDPIPAALCLFSDGATGRGAYCLWKDHLLDFQAVPAPESAQKGELAGLLAGLAAAPPEPVNIWVDSKYLYSLLRTWVLGAWLQPDPVPSYALLYKSLLRHPAIVVGHVRSHSSASHPIASLNNYVDQL

SEQ ID NO: 8012 - protein, 748 aa, Feline foamy virus
MDLLKPLTVERKGVKIKGYWNSQADITCVPKDLLQGEEPVRQQNVTTIHGTQEGDVYYVNLKIDGRRINTEVIGTTLDYAIITPGDVPWILKKPLELTIKLDLEEQQGTLLNNSILSKKGKEELKQLFEKYSALWQSWENQVGHRRIRPHKIATGTVKPTPQKQYHINPKAKPDIQIVINDLLKQGVLIQKESTMNTPVYPVPKPNGRWRMVLDYRAVNKVTPLIAVQNQHSYGILGSLFKGRYKTTIDLSNGFWAHPIVPEDYWITAFTWQGKQYCWTVLPQGFLNSPGLFTGDVVDLLQGIPNVEVYVDDVYISHDSEKEHLEYLDILFNRLKEAGYIISLKKSNIANSIVDFLGFQITNEGRGLTDTFKEKLENITAPTTLKQLQSILGLLNFARNFIPDFTELIAPLYALIPKSTKNYVPWQIEHSTTLETLITKLNGAEYLQGRKGDKTLIMKVNASYTTGYIRYYNEGEKKPISYVSIVFSKTELKFTELEKLLTTVHKGLLKALDLSMGQNIHVYSPIVSMQNIQKTPQTAKKALASRWLSWLSYLEDPRIRFFYDPQMPALKDLPAVDTGKDNKKHPSNFQHIFYTDGSAITSPTKEGHLNAGMGIVYFINKDGNLQKQQEWSISLGNHTAQFAEIAAFEFALKKCLPLGGNILVVTDSNYVAKAYNEELDVWASNGFVNNRKKPLKHISKWKSVADLKRLRPDVVVTHEPGHQKLDSSPHAYGNNLADQLATQASFKVH

SEQ ID NO: 8013 - protein, 748 aa, synthetic construct
MDLLKPLTVERKGVKIKGYWNSQADITCVPKDLLQGEEPVRQQNVTTIHGTQEGDVYYVNLKIDGRRINTEVIGTTLDYAIITPGDVPWILKKPLELTIKLDLEEQQGTLLNNSILSKKGKEELKQLFEKYSALWQSWENQVGHRRIRPHKIATGTVKPTPQKQYHINPKAKPDIQIVINDLLKQGVLIQKESTMNTPVYPVPKPNGRWRMVLDYRAVNKVTPLIAVQNQHSYGILGSLFKGRYKTTIDLSNGFWAHPIVPEDYWITAFTWQGKQYCWTVLPQGFLNSPGLFNGDVVDLLQGIPNVEVYVDDVYISHDSEKEHLEYLDILFNRLKEAGYIISLKKSNIANSIVDFLGFQITNEGRGLTDTFKEKLENITAPTTLKQLQSILGLLNFARNFIPDFTELIAPLYALIPKSPKNYVPWQIEHSTTLETLITKLNGAEYLQGRKGDKTLIMKVNASYTTGYIRYYNEGEKKPISYVSIVFSKTELKFTELEKLLTTVHKGLLKALDLSMGQNIHVYSPIVSMQNIQKTPQTAKKALASRWLSWLSYLEDPRIRFFYDPQMPALKDLPAVDTGKDNKKHPSNFQHIFYTDGSAITSPTKEGHLNAGMGIVYFINKDGNLQKQQEWSISLGNHTAQFAEIAAFEFALKKCLPLGGNILVVTDSNYVAKAYNEELDVWASNGFVNNRKKPLKHISKWKSVADLKRLRPDVVVTHEPGHQKLDSSPHAYGNNLADQLATQASFKVH

SEQ ID NO: 8014 - protein, 748 aa, synthetic construct
MDLLKPLTVERKGVKIKGYWNSQADITCVPKDLLQGEEPVRQQNVTTIHGTQEGDVYYVNLKIDGRRINTEVIGTTLDYAIITPGDVPWILKKPLELTIKLDLEEQQGTLLNNSILSKKGKEELKQLFEKYSALWQSWENQVGHRRIRPHKIATGTVKPTPQKQYHINPKAKPDIQIVINDLLKQGVLIQKESTMNTPVYPVPKPNGRWRMVLDYRAVNKVTPLIAVQNQHSYGILGSLFKGRYKTTIDLSNGFWAHPIVPEDYWITAFTWQGKQYCWTVLPQGFLNSPGLFNGDVVDLLQGIPNVEVYVDDVYISHDSEKEHLEYLDILFNRLKEAGYIISLKKSNIANSIVDFLGFQITNEGRGLTDTFKEKLENITAPTTLKQLQSILGKLNFARNFIPDFTELIAPLYALIPKSPKNYVPWQIEHSTTLETLITKLNGAEYLQGRKGDKTLIMKVNASYTTGYIRYYNEGEKKPISYVSIVFSKTELKFTELEKLLTTVHKGLLKALDLSMGQNIHVYSPIVSMQNIQKTPQTAKKALASRWLSWLSYLEDPRIRFFYDPQMPALKDLPAVDTGKDNKKHPSNFQHIFYTDGSAITSPTKEGHLNAGMGIVYFINKDGNLQKQQEWSISLGNHTAQFAEIAAFEFALKKCLPLGGNILVVTDSNYVAKAYNEELDVWASNGFVNNRKKPLKHISKWKSVADLKRLRPDVVVTHEPGHQKLDSSPHAYGNNLADQLATQASFKVH

SEQ ID NO: 8015 - protein, 662 aa, Feline foamy virus
VPWILKKPLELTIKLDLEEQQGTLLNNSILSKKGKEELKQLFEKYSALWQSWENQVGHRRIRPHKIATGTVKPTPQKQYHINPKAKPDIQIVINDLLKQGVLIQKESTMNTPVYPVPKPNGRWRMVLDYRAVNKVTPLIAVQNQHSYGILGSLFKGRYKTTIDLSNGFWAHPIVPEDYWITAFTWQGKQYCWTVLPQGFLNSPGLFTGDVVDLLQGIPNVEVYVDDVYISHDSEKEHLEYLDILFNRLKEAGYIISLKKSNIANSIVDFLGFQITNEGRGLTDTFKEKLENITAPTTLKQLQSILGLLNFARNFIPDFTELIAPLYALIPKSTKNYVPWQIEHSTTLETLITKLNGAEYLQGRKGDKTLIMKVNASYTTGYIRYYNEGEKKPISYVSIVFSKTELKFTELEKLLTTVHKGLLKALDLSMGQNIHVYSPIVSMQNIQKTPQTAKKALASRWLSWLSYLEDPRIRFFYDPQMPALKDLPAVDTGKDNKKHPSNFQHIFYTDGSAITSPTKEGHLNAGMGIVYFINKDGNLQKQQEWSISLGNHTAQFAEIAAFEFALKKCLPLGGNILVVTDSNYVAKAYNEELDVWASNGFVNNRKKPLKHISKWKSVADLKRLRPDVVVTHEPGHQKLDSSPHAYGNNLADQLATQASFKVH

SEQ ID NO: 8016 - protein, 662 aa, synthetic construct
VPWILKKPLELTIKLDLEEQQGTLLNNSILSKKGKEELKQLFEKYSALWQSWENQVGHRRIRPHKIATGTVKPTPQKQYHINPKAKPDIQIVINDLLKQGVLIQKESTMNTPVYPVPKPNGRWRMVLDYRAVNKVTPLIAVQNQHSYGILGSLFKGRYKTTIDLSNGFWAHPIVPEDYWITAFTWQGKQYCWTVLPQGFLNSPGLFNGDVVDLLQGIPNVEVYVDDVYISHDSEKEHLEYLDILFNRLKEAGYIISLKKSNIANSIVDFLGFQITNEGRGLTDTFKEKLENITAPTTLKQLQSILGLLNFARNFIPDFTELIAPLYALIPKSPKNYVPWQIEHSTTLETLITKLNGAEYLQGRKGDKTLIMKVNASYTTGYIRYYNEGEKKPISYVSIVFSKTELKFTELEKLLTTVHKGLLKALDLSMGQNIHVYSPIVSMQNIQKTPQTAKKALASRWLSWLSYLEDPRIRFFYDPQMPALKDLPAVDTGKDNKKHPSNFQHIFYTDGSAITSPTKEGHLNAGMGIVYFINKDGNLQKQQEWSISLGNHTAQFAEIAAFEFALKKCLPLGGNILVVTDSNYVAKAYNEELDVWASNGFVNNRKKPLKHISKWKSVADLKRLRPDVVVTHEPGHQKLDSSPHAYGNNLADQLATQASFKVH

SEQ ID NO: 8017 - protein, 662 aa, synthetic construct
VPWILKKPLELTIKLDLEEQQGTLLNNSILSKKGKEELKQLFEKYSALWQSWENQVGHRRIRPHKIATGTVKPTPQKQYHINPKAKPDIQIVINDLLKQGVLIQKESTMNTPVYPVPKPNGRWRMVLDYRAVNKVTPLIAVQNQHSYGILGSLFKGRYKTTIDLSNGFWAHPIVPEDYWITAFTWQGKQYCWTVLPQGFLNSPGLFNGDVVDLLQGIPNVEVYVDDVYISHDSEKEHLEYLDILFNRLKEAGYIISLKKSNIANSIVDFLGFQITNEGRGLTDTFKEKLENITAPTTLKQLQSILGKLNFARNFIPDFTELIAPLYALIPKSPKNYVPWQIEHSTTLETLITKLNGAEYLQGRKGDKTLIMKVNASYTTGYIRYYNEGEKKPISYVSIVFSKTELKFTELEKLLTTVHKGLLKALDLSMGQNIHVYSPIVSMQNIQKTPQTAKKALASRWLSWLSYLEDPRIRFFYDPQMPALKDLPAVDTGKDNKKHPSNFQHIFYTDGSAITSPTKEGHLNAGMGIVYFINKDGNLQKQQEWSISLGNHTAQFAEIAAFEFALKKCLPLGGNILVVTDSNYVAKAYNEELDVWASNGFVNNRKKPLKHISKWKSVADLKRLRPDVVVTHEPGHQKLDSSPHAYGNNLADQLATQASFKVH

SEQ ID NO: 8018 - protein, 670 aa, Feline leukemia virus
TLQLEEEYRLFEPESTQKQEMDIWLKNFPQAWAETGGMGTAHCQAPVLIQLKATATPISIRQYPMPHEAYQGIKPHIRRMLDQGILKPCQSPWNTPLLPVKKPGTEDYRPVQDLREVNKRVEDIHPTVPNPYNLLSTLPPSHPWYTVLDLKDAFFCLRLHSESQLLFAFEWRDPEIGLSGQLTWTRLPQGFKNSPTLFDEALHSDLADFRVRYPALVLLQYVDDLLLAAATRTECLEGTKALLETLGNKGYRASAKKAQICLQEVTYLGYSLKDGQRWLTKARKEAILSIPVPKNSRQVREFLGTAGYCRLWIPGFAELAAPLYPLTRPGTLFQWGTEQQLAFEDIKKALLSSPALGLPDITKPFELFIDENSGFAKGVLVQKLGPWKRPVAYLSKKLDTVASGWPPCLRMVAAIAILVKDAGKLTLGQPLTILTSHPVEALVRQPPNKWLSNARMTHYQAMLLDAERVHFGPTVSLNPATLLPLPSGGNHHDCLQILAETHGTRPDLTDQPLPDADLTWYTDGSSFIRNGEREAGAAVTTESEVIWAAPLPPGTSAQRAELIALTQALKMAEGKKLTVYTDSRYAFATTHVHGEIYRRRGLLTSEGKEIKNKNEILALLEALFLPKRLSIIHCPGHQKGDSPQAKGNRLADDTAKKAATETHSSLTVLP

SEQ ID NO: 8019 - protein, 670 aa, synthetic construct
TLQLEEEYRLFEPESTQKQEMDIWLKNFPQAWAETGGMGTAHCQAPVLIQLKATATPISIRQYPMPHEAYQGIKPHIRRMLDQGILKPCQSPWNTPLLPVKKPGTEDYRPVQDLREVNKRVEDIHPTVPNPYNLLSTLPPSHPWYTVLDLKDAFFCLRLHSESQLLFAFEWRDPEIGLSGQLTWTRLPQGFKNSPTLFNEALHSDLADFRVRYPALVLLQYVDDLLLAAATRTECLEGTKALLETLGNKGYRASAKKAQICLQEVTYLGYSLKDGQRWLTKARKEAILSIPVPKNSRQVREFLGTAGYCRLWIPGFAELAAPLYPLTRPGTLFQWGTEQQLAFEDIKKALLSSPALGLPDITKPFELFIDENSGFAKGVLVQKLGPWKRPVAYLSKKLDTVASGWPPCLRMVAAIAILVKDAGKLTLGQPLTILTSHPVEALVRQPPNKWLSNARMTHYQAMLLDAERVHFGPTVSLNPATLLPLPSGGNHHDCLQILAETHGTRPDLTDQPLPDADLTWYTDGSSFIRNGEREAGAAVTTESEVIWAAPLPPGTSAQRAELIALTQALKMAEGKKLTVYTDSRYAFATTHVHGEIYRRRGWLTSEGKEIKNKNEILALLEALFLPKRLSIIHCPGHQKGDSPQAKGNRLADDTAKKAATETHSSLTVLP

SEQ ID NO: 8020 - protein, 670 aa, synthetic construct
TLQLEEEYRLFEPESTQKQEMDIWLKNFPQAWAETGGMGTAHCQAPVLIQLKATATPISIRQYPMPHEAYQGIKPHIRRMLDQGILKPCQSPWNTPLLPVKKPGTEDYRPVQDLREVNKRVEDIHPTVPNPYNLLSTLPPSHPWYTVLDLKDAFFCLRLHSESQLLFAFEWRDPEIGLSGQLTWTRLPQGFKNSPTLFNEALHSDLADFRVRYPALVLLQYVDDLLLAAATRTECLEGTKALLETLGNKGYRASAKKAQICLQEVTYLGYSLKDGQRWLTKARKEAILSIPVPKNSRQVREFLGKAGYCRLFIPGFAELAAPLYPLTRPGTLFQWGTEQQLAFEDIKKALLSSPALGLPDITKPFELFIDENSGFAKGVLVQKLGPWKRPVAYLSKKLDTVASGWPPCLRMVAAIAILVKDAGKLTLGQPLTILTSHPVEALVRQPPNKWLSNARMTHYQAMLLDAERVHFGPTVSLNPATLLPLPSGGNHHDCLQILAETHGTRPDLTDQPLPDADLTWYTDGSSFIRNGEREAGAAVTTESEVIWAAPLPPGTSAQRAELIALTQALKMAEGKKLTVYTDSRYAFATTHVHGEIYRRRGWLTSEGKEIKNKNEILALLEALFLPKRLSIIHCPGHQKGDSPQAKGNRLADDTAKKAATETHSSLTVLP

SEQ ID NO: 8021 - protein, 751 aa, unidentified
MNPLQLLQPLPAEIKGTKLLAHWNSGATITCIPESFLEDEQPIKKTLIKTIHGEKQQNVYYVTFKVKGRKVEAEVIASPYEYILLSPTDVPWLTQQPLQLTILVPLQEYQEKILSKTALPEDQKQQLKTLFVKYDNLWQHWENQVGHRKIRPHNIATGDYPPRPQKQYPINPKAKPSIQIVIDDLLKQGVLTPQNSTMNTPVYPVPKPDGRWRMVLDYREVNKTIPLTAAQNQHSAGILATIVRQKYKTTLDLANGFWAHPITPESYWLTAFTWQGKQYCWTRLPQGFLNSPALFTADVVDLLKEIPNVQVYVDDIYLSHDDPKEHVQQLEKVFQILLQAGYVVSLKKSEIGQKTVEFLGFNITKEGRGLTDTFKTKLLNITPPKDLKQLQSILGLLNFARNFIPNFAELVQPLYNLIASAKGKYIEWSEENTKQLNMVIEALNTASNLEERLPEQRLVIKVNTSPSAGYVRYYNETGKKPIMYLNYVFSKAELKFSMLEKLLTTMHKALIKAMDLAMGQEILVYSPIVSMTKIQKTPLPERKALPIRWITWMTYLEDPRIQFHYDKTLPELKHIPDVYTSSQSPVKHPSQYEGVFYTDGSAIKSPDPTKSNNAGMGIVHATYKPEYQVLNQWSIPLGNHTAQMAEIAAVEFACKKALKIPGPVLVITDSFYVAESANKELPYWKSNGFVNNKKKPLKHISKWKSIAECLSMKPDITIQHEKGISLQIPVFILKGNALADKLATQGSYVVN

SEQ ID NO: 8022 - protein, 751 aa, synthetic construct
MNPLQLLQPLPAEIKGTKLLAHWNSGATITCIPESFLEDEQPIKKTLIKTIHGEKQQNVYYVTFKVKGRKVEAEVIASPYEYILLSPTDVPWLTQQPLQLTILVPLQEYQEKILSKTALPEDQKQQLKTLFVKYDNLWQHWENQVGHRKIRPHNIATGDYPPRPQKQYPINPKAKPSIQIVIDDLLKQGVLTPQNSTMNTPVYPVPKPDGRWRMVLDYREVNKTIPLTAAQNQHSAGILATIVRQKYKTTLDLANGFWAHPITPESYWLTAFTWQGKQYCWTRLPQGFLNSPALFNADVVDLLKEIPNVQVYVDDIYLSHDDPKEHVQQLEKVFQILLQAGYVVSLKKSEIGQKTVEFLGFNITKEGRGLTDTFKTKLLNITPPKDLKQLQSILGLLNFARNFIPNFAELVQPLYNLIAPAKGKYIEWSEENTKQLNMVIEALNTASNLEERLPEQRLVIKVNTSPSAGYVRYYNETGKKPIMYLNYVFSKAELKFSMLEKLLTTMHKALIKAMDLAMGQEILVYSPIVSMTKIQKTPLPERKALPIRWITWMTYLEDPRIQFHYDKTLPELKHIPDVYTSSQSPVKHPSQYEGVFYTDGSAIKSPDPTKSNNAGMGIVHATYKPEYQVLNQWSIPLGNHTAQMAEIAAVEFACKKALKIPGPVLVITDSFYVAESANKELPYWKSNGFVNNKKKPLKHISKWKSIAECLSMKPDITIQHEKGISLQIPVFILKGNALADKLATQGSYVVN

SEQ ID NO: 8023 - protein, 751 aa, synthetic construct
MNPLQLLQPLPAEIKGTKLLAHWNSGATITCIPESFLEDEQPIKKTLIKTIHGEKQQNVYYVTFKVKGRKVEAEVIASPYEYILLSPTDVPWLTQQPLQLTILVPLQEYQEKILSKTALPEDQKQQLKTLFVKYDNLWQHWENQVGHRKIRPHNIATGDYPPRPQKQYPINPKAKPSIQIVIDDLLKQGVLTPQNSTMNTPVYPVPKPDGRWRMVLDYREVNKTIPLTAAQNQHSAGILATIVRQKYKTTLDLANGFWAHPITPESYWLTAFTWQGKQYCWTRLPQGFLNSPALFNADVVDLLKEIPNVQVYVDDIYLSHDDPKEHVQQLEKVFQILLQAGYVVSLKKSEIGQKTVEFLGFNITKEGRGLTDTFKTKLLNITPPKDLKQLQSILGKLNFARNFIPNFAELVQPLYNLIAPAKGKYIEWSEENTKQLNMVIEALNTASNLEERLPEQRLVIKVNTSPSAGYVRYYNETGKKPIMYLNYVFSKAELKFSMLEKLLTTMHKALIKAMDLAMGQEILVYSPIVSMTKIQKTPLPERKALPIRWITWMTYLEDPRIQFHYDKTLPELKHIPDVYTSSQSPVKHPSQYEGVFYTDGSAIKSPDPTKSNNAGMGIVHATYKPEYQVLNQWSIPLGNHTAQMAEIAAVEFACKKALKIPGPVLVITDSFYVAESANKELPYWKSNGFVNNKKKPLKHISKWKSIAECLSMKPDITIQHEKGISLQIPVFILKGNALADKLATQGSYVVN

SEQ ID NO: 8024 - protein, 662 aa, unidentified
VPWLTQQPLQLTILVPLQEYQEKILSKTALPEDQKQQLKTLFVKYDNLWQHWENQVGHRKIRPHNIATGDYPPRPQKQYPINPKAKPSIQIVIDDLLKQGVLTPQNSTMNTPVYPVPKPDGRWRMVLDYREVNKTIPLTAAQNQHSAGILATIVRQKYKTTLDLANGFWAHPITPESYWLTAFTWQGKQYCWTRLPQGFLNSPALFTADVVDLLKEIPNVQVYVDDIYLSHDDPKEHVQQLEKVFQILLQAGYVVSLKKSEIGQKTVEFLGFNITKEGRGLTDTFKTKLLNITPPKDLKQLQSILGLLNFARNFIPNFAELVQPLYNLIASAKGKYIEWSEENTKQLNMVIEALNTASNLEERLPEQRLVIKVNTSPSAGYVRYYNETGKKPIMYLNYVFSKAELKFSMLEKLLTTMHKALIKAMDLAMGQEILVYSPIVSMTKIQKTPLPERKALPIRWITWMTYLEDPRIQFHYDKTLPELKHIPDVYTSSQSPVKHPSQYEGVFYTDGSAIKSPDPTKSNNAGMGIVHATYKPEYQVLNQWSIPLGNHTAQMAEIAAVEFACKKALKIPGPVLVITDSFYVAESANKELPYWKSNGFVNNKKKPLKHISKWKSIAECLSMKPDITIQHEKGISLQIPVFILKGNALADKLATQGSYVVN

SEQ ID NO: 8025 - protein, 662 aa, synthetic construct
VPWLTQQPLQLTILVPLQEYQEKILSKTALPEDQKQQLKTLFVKYDNLWQHWENQVGHRKIRPHNIATGDYPPRPQKQYPINPKAKPSIQIVIDDLLKQGVLTPQNSTMNTPVYPVPKPDGRWRMVLDYREVNKTIPLTAAQNQHSAGILATIVRQKYKTTLDLANGFWAHPITPESYWLTAFTWQGKQYCWTRLPQGFLNSPALFNADVVDLLKEIPNVQVYVDDIYLSHDDPKEHVQQLEKVFQILLQAGYVVSLKKSEIGQKTVEFLGFNITKEGRGLTDTFKTKLLNITPPKDLKQLQSILGLLNFARNFIPNFAELVQPLYNLIAPAKGKYIEWSEENTKQLNMVIEALNTASNLEERLPEQRLVIKVNTSPSAGYVRYYNETGKKPIMYLNYVFSKAELKFSMLEKLLTTMHKALIKAMDLAMGQEILVYSPIVSMTKIQKTPLPERKALPIRWITWMTYLEDPRIQFHYDKTLPELKHIPDVYTSSQSPVKHPSQYEGVFYTDGSAIKSPDPTKSNNAGMGIVHATYKPEYQVLNQWSIPLGNHTAQMAEIAAVEFACKKALKIPGPVLVITDSFYVAESANKELPYWKSNGFVNNKKKPLKHISKWKSIAECLSMKPDITIQHEKGISLQIPVFILKGNALADKLATQGSYVVN

SEQ ID NO: 8026 - protein, 662 aa, synthetic construct
VPWLTQQPLQLTILVPLQEYQEKILSKTALPEDQKQQLKTLFVKYDNLWQHWENQVGHRKIRPHNIATGDYPPRPQKQYPINPKAKPSIQIVIDDLLKQGVLTPQNSTMNTPVYPVPKPDGRWRMVLDYREVNKTIPLTAAQNQHSAGILATIVRQKYKTTLDLANGFWAHPITPESYWLTAFTWQGKQYCWTRLPQGFLNSPALFNADVVDLLKEIPNVQVYVDDIYLSHDDPKEHVQQLEKVFQILLQAGYVVSLKKSEIGQKTVEFLGFNITKEGRGLTDTFKTKLLNITPPKDLKQLQSILGKLNFARNFIPNFAELVQPLYNLIAPAKGKYIEWSEENTKQLNMVIEALNTASNLEERLPEQRLVIKVNTSPSAGYVRYYNETGKKPIMYLNYVFSKAELKFSMLEKLLTTMHKALIKAMDLAMGQEILVYSPIVSMTKIQKTPLPERKALPIRWITWMTYLEDPRIQFHYDKTLPELKHIPDVYTSSQSPVKHPSQYEGVFYTDGSAIKSPDPTKSNNAGMGIVHATYKPEYQVLNQWSIPLGNHTAQMAEIAAVEFACKKALKIPGPVLVITDSFYVAESANKELPYWKSNGFVNNKKKPLKHISKWKSIAECLSMKPDITIQHEKGISLQIPVFILKGNALADKLATQGSYVVN

SEQ ID NO: 8027 - protein, 669 aa, Gibbon ape leukemia virus
VLNLEEEYRLHEKPVPSSIDPSWLQLFPTVWAERAGMGLANQVPPVVVELRSGASPVAVRQYPMSKEAREGIRPHIQKFLDLGVLVPCRSPWNTPLLPVKKPGTNDYRPVQDLREINKRVQDIHPTVPNPYNLLSSLPPSYTWYSVLDLKDAFFCLRLHPNSQPLFAFEWKDPEKGNTGQLTWTRLPQGFKNSPTLFDEALHRDLAPFRALNPQVVLLQYVDDLLVAAPTYEDCKKGTQKLLQELSKLGYRVSAKKAQLCQREVTYLGYLLKEGKRWLTPARKATVMKIPVPTTPRQVREFLGTAGFCRLWIPGFASLAAPLYPLTKESIPFIWTEEHQQAFDHIKKALLSAPALALPDLTKPFTLYIDERAGVARGVLTQTLGPWRRPVAYLSKKLDPVASGWPTCLKAVAAVALLLKDADKLTLGQNVTVIASHSLESIVRQPPDRWMTNARMTHYQSLLLNERVSFAPPAVLNPATLLPVESEATPVHRCSEILAEETGTRRDLEDQPLPGVPTWYTDGSSFITEGKRRAGAPIVDGKRTVWASSLPEGTSAQKAELVALTQALRLAEGKNINIYTDSRYAFATAHIHGAIYKQRGLLTSAGKDIKNKEEILALLEAIHLPRRVAIIHCPGHQRGSNPVATGNRRADEAAKQAALSTRVLAGTTKP

SEQ ID NO: 8028 - protein, 669 aa, synthetic construct
VLNLEEEYRLHEKPVPSSIDPSWLQLFPTVWAERAGMGLANQVPPVVVELRSGASPVAVRQYPMSKEAREGIRPHIQKFLDLGVLVPCRSPWNTPLLPVKKPGTNDYRPVQDLREINKRVQDIHPTVPNPYNLLSSLPPSYTWYSVLDLKDAFFCLRLHPNSQPLFAFEWKDPEKGNTGQLTWTRLPQGFKNSPTLFNEALHRDLAPFRALNPQVVLLQYVDDLLVAAPTYEDCKKGTQKLLQELSKLGYRVSAKKAQLCQREVTYLGYLLKEGKRWLTPARKATVMKIPVPTTPRQVREFLGTAGFCRLWIPGFASLAAPLYPLTKPSIPFIWTEEHQQAFDHIKKALLSAPALALPDLTKPFTLYIDERAGVARGVLTQTLGPWRRPVAYLSKKLDPVASGWPTCLKAVAAVALLLKDADKLTLGQNVTVIASHSLESIVRQPPDRWMTNARMTHYQSLLLNERVSFAPPAVLNPATLLPVESEATPVHRCSEILAEETGTRRDLEDQPLPGVPTWYTDGSSFITEGKRRAGAPIVDGKRTVWASSLPEGTSAQKAELVALTQALRLAEGKNINIYTDSRYAFATAHIHGAIYKQRGWLTSAGKDIKNKEEILALLEAIHLPRRVAIIHCPGHQRGSNPVATGNRRADEAAKQAALSTRVLAGTTKP

SEQ ID NO: 8029 - protein, 669 aa, synthetic construct
VLNLEEEYRLHEKPVPSSIDPSWLQLFPTVWAERAGMGLANQVPPVVVELRSGASPVAVRQYPMSKEAREGIRPHIQKFLDLGVLVPCRSPWNTPLLPVKKPGTNDYRPVQDLREINKRVQDIHPTVPNPYNLLSSLPPSYTWYSVLDLKDAFFCLRLHPNSQPLFAFEWKDPEKGNTGQLTWTRLPQGFKNSPTLFNEALHRDLAPFRALNPQVVLLQYVDDLLVAAPTYEDCKKGTQKLLQELSKLGYRVSAKKAQLCQREVTYLGYLLKEGKRWLTPARKATVMKIPVPTTPRQVREFLGKAGFCRLFIPGFASLAAPLYPLTKPSIPFIWTEEHQQAFDHIKKALLSAPALALPDLTKPFTLYIDERAGVARGVLTQTLGPWRRPVAYLSKKLDPVASGWPTCLKAVAAVALLLKDADKLTLGQNVTVIASHSLESIVRQPPDRWMTNARMTHYQSLLLNERVSFAPPAVLNPATLLPVESEATPVHRCSEILAEETGTRRDLEDQPLPGVPTWYTDGSSFITEGKRRAGAPIVDGKRTVWASSLPEGTSAQKAELVALTQALRLAEGKNINIYTDSRYAFATAHIHGAIYKQRGWLTSAGKDIKNKEEILALLEAIHLPRRVAIIHCPGHQRGSNPVATGNRRADEAAKQAALSTRVLAGTTKP

SEQ ID NO: 8030 - protein, 588 aa, unidentified
AVLGLEHLPRPPQISQFPLNPERLQALQHLVRKALEAGHIEPYTGPGNNPVFPVKKANGTWRFIHDLRATNSLTIDLSSSSPGPPDLSSLPTTLAHLQTIDLRDAFFQIPLPKQFQPYFAFTVPQQCNYGPGTRYAWKVLPQGFKNSPTLFEMQLAHILQPIRQAFPQCTILQYMDDILLASPSHEDLLLLSEATMASLISHGLPVSENKTQQTPGTIKFLGQIISPNHLTYDAVPTVPIRSRWALPELQALLGEIQWVSKGTPTLRQPLHSLYCALQRHTDPRDQIYLNPSQVQSLVQLRQALSQNCRSRLVQTLPLLGAIMLTLTGTTTVVFQSKEQWPLVWLHAPLPHTSQCPWGQLLASAVLLLDKYTLQSYGLLCQTIHHNISTQTFNQFIQTSDHPSVPILLHHSHRFKNLGAQTGELWNTFLKTAAPLAPVKALMPVFTLSPVIINTAPCLFSDGSTSRAAYILWDKQILSQRSFPLPPPHKSAQRAELLGLLHGLSSARSWRCLNIFLDSKYLYHYLRTLALGTFQGRSSQAPFQALLPRLLSRKVVYLHHVRSHTNLPDPISRLNALTDALLITPVLQL

SEQ ID NO: 8031 - protein, 588 aa, synthetic construct
AVLGLEHLPRPPQISQFPLNPERLQALQHLVRKALEAGHIEPYTGPGNNPVFPVKKANGTWRFIHDLRATNSLTIDLSSSSPGPPDLSSLPTTLAHLQTIDLRDAFFQIPLPKQFQPYFAFTVPQQCNYGPGTRYAWKVLPQGFKNSPTLFQMQLAHILQPIRQAFPQCTILQYMDDILLASPSHEDLLLLSEATMASLISHGLPVSENKTQQTPGTIKFLGQIISPNHLTYDAVPTVPIRSRWALPELQALLGEIQWVSKGTPTLRQPLHSLYCALQPHTDPRDQIYLNPSQVQSLVQLRQALSQNCRSRLVQTLPLLGAIMLTLTGTTTVVFQSKEQWPLVWLHAPLPHTSQCPWGQLLASAVLLLDKYTLQSYGLLCQTIHHNISTQTFNQFIQTSDHPSVPILLHHSHRFKNLGAQTGELWNTFLKTAAPLAPVKALMPVFTLSPVIINTAPCLFSDGSTSRAAYILWDKQILSQRSFPLPPPHKSAQRAELLGLLHGLSSARSWRCLNIFLDSKYLYHYLRTLALGTFQGRSSQAPFQALLPRLLSRKVVYLHHVRSHTNLPDPISRLNALTDALLITPVLQL

SEQ ID NO: 8032 - protein, 588 aa, synthetic construct
AVLGLEHLPRPPQISQFPLNPERLQALQHLVRKALEAGHIEPYTGPGNNPVFPVKKANGTWRFIHDLRATNSLTIDLSSSSPGPPDLSSPPTTLAHLQTIDLRDAFFQIPLPKQFQPYFAFTVPQQCNYGPGTRYAWKVLPQGFKNSPTLFQMQLAHILQPIRQAFPQCTILQYMDDILLASPSHEDLLLLSEATMASLISHGLPVSENKTQQTPGTIKFLGQIISPNHLTYDAVPTVPIRSRWALPELQALLGEIQWVSKGTPTLRQPLHSLYCALQPHTDPRDQIYLNPSQVQSLVQLRQALSQNCRSRLVQTLPLLGAIMLTLTGTTTVVFQSKEQWPLVWLHAPLPHTSQCPWGQLLASAVLLLDKYTLQSYGLLCQTIHHNISTQTFNQFIQTSDHPSVPILLHHSHRFKNLGAQTGELWNTFLKTAAPLAPVKALMPVFTLSPVIINTAPCLFSDGSTSRAAYILWDKQILSQRSFPLPPPHKSAQRAELLGLLHGLSSARSWRCLNIFLDSKYLYHYLRTLALGTFQGRSSQAPFQALLPRLLSRKVVYLHHVRSHTNLPDPISRLNALTDALLITPVLQL

SEQ ID NO: 8033 - protein, 588 aa, unidentified
AVLGLEHLPRPPEISQFPLNPERLQALQHLVRKALEAGHIEPYTGPGNNPVFPVKKANGTWRFIHDLRATNSLTIDLSSSSPGPPDLSSLPTTLAHLQTIDLKDAFFQIPLPKQFQPYFAFTVPQQCNYGPGTRYAWRVLPQGFKNSPTLFEMQLAHILQPIRQAFPQCTILQYMDDILLASPSHADLQLLSEATMASLISHGLPVSENKTQQTPGTIKFLGQIISPNHLTYDAVPKVPIRSRWALPELQALLGEIQWVSKGTPTLRQPLHSLYCALQRHTDPRDQIYLNPSQVQSLVQLRQALSQNCRSRLVQTLPLLGAIMLTLTGTTTVVFQSKQQWPLVWLHAPLPHTSQCPWGQLLASAVLLLDKYTLQSYGLLCQTIHHNISTQTFNQFIQTSDHPSVPILLHHSHRFKNLGAQTGELWNTFLKTTAPLAPVKALMPVFTLSPVIINTAPCLFSDGSTSQAAYILWDKHILSQRSFPLPPPHKSAQRAELLGLLHGLSSARSWRCLNIFLDSKYLYHYLRTLALGTFQGRSSQAPFQALLPRLLSRKVVYLHHVRSHTNLPDPISRLNALTDALLITPVLQL

SEQ ID NO: 8034 - protein, 588 aa, synthetic construct
AVLGLEHLPRPPEISQFPLNPERLQALQHLVRKALEAGHIEPYTGPGNNPVFPVKKANGTWRFIHDLRATNSLTIDLSSSSPGPPDLSSLPTTLAHLQTIDLKDAFFQIPLPKQFQPYFAFTVPQQCNYGPGTRYAWRVLPQGFKNSPTLFQMQLAHILQPIRQAFPQCTILQYMDDILLASPSHADLQLLSEATMASLISHGLPVSENKTQQTPGTIKFLGQIISPNHLTYDAVPKVPIRSRWALPELQALLGEIQWVSKGTPTLRQPLHSLYCALQPHTDPRDQIYLNPSQVQSLVQLRQALSQNCRSRLVQTLPLLGAIMLTLTGTTTVVFQSKQQWPLVWLHAPLPHTSQCPWGQLLASAVLLLDKYTLQSYGLLCQTIHHNISTQTFNQFIQTSDHPSVPILLHHSHRFKNLGAQTGELWNTFLKTTAPLAPVKALMPVFTLSPVIINTAPCLFSDGSTSQAAYILWDKHILSQRSFPLPPPHKSAQRAELLGLLHGLSSARSWRCLNIFLDSKYLYHYLRTLALGTFQGRSSQAPFQALLPRLLSRKVVYLHHVRSHTNLPDPISRLNALTDALLITPVLQL

SEQ ID NO: 8035 - protein, 583 aa, unidentified
GLEHLPRPPEISQFPLNPERLQALQHLVRKALEAGHIEPYTGPGNNPVFPVKKANGTWRFIHDLRATNSLTVDLSSSSPGPPDLSSLPTTLAHLQTIDLKDAFFQIPLPKQFQPYFAFTVPQQCNYGPGTRYAWKVLPQGFKNSPTLFEMQLASILQPIRQAFPQCVILQYMDDILLASPSPEDLQQLSEATMASLISHGLPVSQDKTQQTPGTIKFLGQIISPNHITYDAVPTVPIRSRWALPELQALLGEIQWVSKGTPTLRQPLHSLYCALQGHTDPRDQIYLNPSQVQSLMQLQQALSQNCRSRLAQTLPLLGAIMLTLTGTTTVVFQSKQQWPLVWLHAPLPHTSQCPWGQLLASAVLLLDKYTLQSYGLLCQTIHHNISIQTFNQFIQTSDHPSVPILLHHSHRFKNLGAQTGELWNTFLKTAAPLAPVKALTPVFTLSPIIINTAPCLFSDGSTSQAAYILWDKHILSQRSFPLPPPHKSAQQAELLGLLHGLSSARSWHCLNIFLDSKYLYHYLRTLALGTFQGKSSQAPFQALLPRLLAHKVIYLHHVRSHTNLPDPISKLNALTDALLITPIL

SEQ ID NO: 8036 - protein, 583 aa, synthetic construct
GLEHLPRPPEISQFPLNPERLQALQHLVRKALEAGHIEPYTGPGNNPVFPVKKANGTWRFIHDLRATNSLTVDLSSSSPGPPDLSSLPTTLAHLQTIDLKDAFFQIPLPKQFQPYFAFTVPQQCNYGPGTRYAWKVLPQGFKNSPTLFQMQLASILQPIRQAFPQCVILQYMDDILLASPSPEDLQQLSEATMASLISHGLPVSQDKTQQTPGTIKFLGQIISPNHITYDAVPTVPIRSRWALPELQALLGEIQWVSKGTPTLRQPLHSLYCALQGHTDPRDQIYLNPSQVQSLMQLQQALSQNCRSRLAQTLPLLGAIMLTLTGTTTVVFQSKQQWPLVWLHAPLPHTSQCPWGQLLASAVLLLDKYTLQSYGLLCQTIHHNISIQTFNQFIQTSDHPSVPILLHHSHRFKNLGAQTGELWNTFLKTAAPLAPVKALTPVFTLSPIIINTAPCLFSDGSTSQAAYILWDKHILSQRSFPLPPPHKSAQQAELLGLLHGLSSARSWHCLNIFLDSKYLYHYLRTLAWGTFQGKSSQAPFQALLPRLLAHKVIYLHHVRSHTNLPDPISKLNALTDALLITPIL

SEQ ID NO: 8037 - protein, 583 aa, synthetic construct
GLEHLPRPPEISQFPLNPERLQALQHLVRKALEAGHIEPYTGPGNNPVFPVKKANGTWRFIHDLRATNSLTVDLSSSSPGPPDLSSPPTTLAHLQTIDLKDAFFQIPLPKQFQPYFAFTVPQQCNYGPGTRYAWKVLPQGFKNSPTLFQMQLASILQPIRQAFPQCVILQYMDDILLASPSPEDLQQLSEATMASLISHGLPVSQDKTQQTPGTIKFLGQIISPNHITYDAVPTVPIRSRWALPELQALLGEIQWVSKGTPTLRQPLHSLYCALQGHTDPRDQIYLNPSQVQSLMQLQQALSQNCRSRLAQTLPLLGAIMLTLTGTTTVVFQSKQQWPLVWLHAPLPHTSQCPWGQLLASAVLLLDKYTLQSYGLLCQTIHHNISIQTFNQFIQTSDHPSVPILLHHSHRFKNLGAQTGELWNTFLKTAAPLAPVKALTPVFTLSPIIINTAPCLFSDGSTSQAAYILWDKHILSQRSFPLPPPHKSAQQAELLGLLHGLSSARSWHCLNIFLDSKYLYHYLRTLAWGTFQGKSSQAPFQALLPRLLAHKVIYLHHVRSHTNLPDPISKLNALTDALLITPIL

SEQ ID NO: 8038 - protein, 584 aa, unidentified
GLEHLPPPPEVSQFPLNPERLQALTDLVSRALEAKHIEPYQGPGNNPIFPVKKPNGKWRFIHDLRATNSVTRDLASPSPGPPDLTSLPQGLPHLRTIDLTDAFFQIPLPTIFQPYFAFTLPQPNNYGPGTRYSWRVLPQGFKNSPTLFEQQLSHILTPVRKTFPNSLIIQYMDDILLASPAPGELAALTDKVTNALTKEGLPLSPEKTQATPGPIHFLGQVISQDCITYETLPSINVKSTWSLAELQSMLGELQWVSKGTPVLRSSLHQLYLALRGHRDPRDTIKLTSIQVQALRTIQKALTLNCRSRLVNQLPILALIMLRPTGTTAVLFQTKQKWPLVWLHTPHPATSLRPWGQLLANAVIILDKYSLQHYGQVCKSFHHNISNQALTYYLHTSDQSSVAILLQHSHRFHNLGAQPSGPWRSLLQMPQIFQNIDVLRPPFTISPVVINHAPCLFSDGSASKAAFIIWDRQVIHQQVLSLPSTCSAQAGELFGLLAGLQKSQPWVALNIFLDSKFLIGHLRRMALGAFPGPSTQCELHTQLLPLLQGKTVYVHHVRSHTLLQDPISRLNEATDALMLAPLLPL

SEQ ID NO: 8039 - protein, 584 aa, synthetic construct
GLEHLPPPPEVSQFPLNPERLQALTDLVSRALEAKHIEPYQGPGNNPIFPVKKPNGKWRFIHDLRATNSVTRDLASPSPGPPDLTSLPQGLPHLRTIDLTDAFFQIPLPTIFQPYFAFTLPQPNNYGPGTRYSWRVLPQGFKNSPTLFQQQLSHILTPVRKTFPNSLIIQYMDDILLASPAPGELAALTDKVTNALTKEGLPLSPEKTQATPGPIHFLGQVISQDCITYETLPSINVKSTWSLAELQSMLGELQWVSKGTPVLRSSLHQLYLALRGHRDPRDTIKLTSIQVQALRTIQKALTLNCRSRLVNQLPILALIMLRPTGTTAVLFQTKQKWPLVWLHTPHPATSLRPWGQLLANAVIILDKYSLQHYGQVCKSFHHNISNQALTYYLHTSDQSSVAILLQHSHRFHNLGAQPSGPWRSLLQMPQIFQNIDVLRPPFTISPVVINHAPCLFSDGSASKAAFIIWDRQVIHQQVLSLPSTCSAQAGELFGLLAGLQKSQPWVALNIFLDSKFLIGHLRRMAWGAFPGPSTQCELHTQLLPLLQGKTVYVHHVRSHTLLQDPISRLNEATDALMLAPLLPL

SEQ ID NO: 8040 - protein, 584 aa, synthetic construct
GLEHLPPPPEVSQFPLNPERLQALTDLVSRALEAKHIEPYQGPGNNPIFPVKKPNGKWRFIHDLRATNSVTRDLASPSPGPPDLTSPPQGLPHLRTIDLTDAFFQIPLPTIFQPYFAFTLPQPNNYGPGTRYSWRVLPQGFKNSPTLFQQQLSHILTPVRKTFPNSLIIQYMDDILLASPAPGELAALTDKVTNALTKEGLPLSPEKTQATPGPIHFLGQVISQDCITYETLPSINVKSTWSLAELQSMLGELQWVSKGTPVLRSSLHQLYLALRGHRDPRDTIKLTSIQVQALRTIQKALTLNCRSRLVNQLPILALIMLRPTGTTAVLFQTKQKWPLVWLHTPHPATSLRPWGQLLANAVIILDKYSLQHYGQVCKSFHHNISNQALTYYLHTSDQSSVAILLQHSHRFHNLGAQPSGPWRSLLQMPQIFQNIDVLRPPFTISPVVINHAPCLFSDGSASKAAFIIWDRQVIHQQVLSLPSTCSAQAGELFGLLAGLQKSQPWVALNIFLDSKFLIGHLRRMAWGAFPGPSTQCELHTQLLPLLQGKTVYVHHVRSHTLLQDPISRLNEATDALMLAPLLPL

SEQ ID NO: 8041 - protein, 584 aa, unidentified
GLEHLPPPPEVSQFPLNPERLQALTDLVSRALEAKHIEPYQGPGNNPIFPVKKPNGKWRFIHDLRATNSLTRDLASPSPGPPDLTSLPQDLPHLRTIDLTDAFFQIPLPAVFQPYFAFTLPQPNNHGPGTRYSWRVLPQGFKNSPTLFEQQLSHILAPVRKAFPNSLIIQYMDDILLASPALRELTALTDKVTNALTKEGLPMSLEKTQATPGSIHFLGQVISPDCITYETLPSIHVKSIWSLAELQSMLGELQWVSKGTPVLRSSLHQLYLALRGHRDPRDTIELTSTQVQALKTIQKALALNCRSRLVSQLPILALIILRPTGTTAVLFQTKQKWPLVWLHTPHPATSLRPWGQLLANAIITLDKYSLQHYGQICKSFHHNISNQALTYYLHTSDQSSVAILLQHSHRFHNLGAQPSGPWRSLLQVPQIFQNIDVLRPPFIISPVVIDHAPCLFSDGATSKAAFILWDKQVIHQQVLPLPSTCSAQAGELFGLLAGLQKSKPWPALNIFLDSKFLIGHLRRMALGAFLGPSTQCDLHARLFPLLQGKTVYVHHVRSHTLLQDPISRLNEATDALMLAPLLPL

SEQ ID NO: 8042 - protein, 584 aa, synthetic construct
GLEHLPPPPEVSQFPLNPERLQALTDLVSRALEAKHIEPYQGPGNNPIFPVKKPNGKWRFIHDLRATNSLTRDLASPSPGPPDLTSLPQDLPHLRTIDLTDAFFQIPLPAVFQPYFAFTLPQPNNHGPGTRYSWRVLPQGFKNSPTLFQQQLSHILAPVRKAFPNSLIIQYMDDILLASPALRELTALTDKVTNALTKEGLPMSLEKTQATPGSIHFLGQVISPDCITYETLPSIHVKSIWSLAELQSMLGELQWVSKGTPVLRSSLHQLYLALRGHRDPRDTIELTSTQVQALKTIQKALALNCRSRLVSQLPILALIILRPTGTTAVLFQTKQKWPLVWLHTPHPATSLRPWGQLLANAIITLDKYSLQHYGQICKSFHHNISNQALTYYLHTSDQSSVAILLQHSHRFHNLGAQPSGPWRSLLQVPQIFQNIDVLRPPFIISPVVIDHAPCLFSDGATSKAAFILWDKQVIHQQVLPLPSTCSAQAGELFGLLAGLQKSKPWPALNIFLDSKFLIGHLRRMAWGAFLGPSTQCDLHARLFPLLQGKTVYVHHVRSHTLLQDPISRLNEATDALMLAPLLPL

SEQ ID NO: 8043 - protein, 584 aa, synthetic construct
GLEHLPPPPEVSQFPLNPERLQALTDLVSRALEAKHIEPYQGPGNNPIFPVKKPNGKWRFIHDLRATNSLTRDLASPSPGPPDLTSPPQDLPHLRTIDLTDAFFQIPLPAVFQPYFAFTLPQPNNHGPGTRYSWRVLPQGFKNSPTLFQQQLSHILAPVRKAFPNSLIIQYMDDILLASPALRELTALTDKVTNALTKEGLPMSLEKTQATPGSIHFLGQVISPDCITYETLPSIHVKSIWSLAELQSMLGELQWVSKGTPVLRSSLHQLYLALRGHRDPRDTIELTSTQVQALKTIQKALALNCRSRLVSQLPILALIILRPTGTTAVLFQTKQKWPLVWLHTPHPATSLRPWGQLLANAIITLDKYSLQHYGQICKSFHHNISNQALTYYLHTSDQSSVAILLQHSHRFHNLGAQPSGPWRSLLQVPQIFQNIDVLRPPFIISPVVIDHAPCLFSDGATSKAAFILWDKQVIHQQVLPLPSTCSAQAGELFGLLAGLQKSKPWPALNIFLDSKFLIGHLRRMAWGAFLGPSTQCDLHARLFPLLQGKTVYVHHVRSHTLLQDPISRLNEATDALMLAPLLPL

SEQ ID NO: 8044 - protein, 584 aa, synthetic construct
HLPPPPQVDQFPLNLPERLQALNDLVSKALEAGHIEPYSGPGNNPVFPVKKPNGKWRFIHDLRATNAITTTLTSPSPGPPDLTSLPTALPHLQTIDLTDAFFQIPLPKQYQPYFAFTIPQPCNYGPGTRYAWTVLPQGFKNSPTLFQQQLAAVLNPMRKMFPTSTIVQYMDDILLASPTNEELQQLSQLTLQALTTHGLPISQEKTQQTPGQIRFLGQVISPNHITYESTPTIPIKSQWTLTELQVILGEIQWVSKGTPILRKHLQSLYSALHPYRDPRACITLTPQQLHALHAIQQALQHNCRGRLNPALPLLGLISLSTSGTTSVIFQPKQNWPLAWLHTPHPPTSLCPWGHLLACTILTLDKYTLQHYGQLCQSFHHNMSKQALCDFLRNSPHPSVGILIHHMGRFHNLGSQPSGPWKTLLHLPTLLQEPRLLRPIFTLSPVVLDTAPCLFSDGSPQKAAYVLWDQTILQQDITPLPSHETHSAQKGELLALICGLRAAKPWPSLNIFLDSKYLIKYLHSLAIGAFLGTSAHQTLQAALPPLLQGKTIYLHHVRSHTNLPDPISTFNEYTDSLILAPLVPL

SEQ ID NO: 8045 - protein, 581 aa, Jaagsiekte sheep retrovirus
PLGTSDSPVTHADPIDWKSEEPVWVDQWPLTQEKLSAAQQLVQEQLRLGHIEPSTSAWNSPIFVIKKKSGKWRLLQDLRKVNETMMHMGALQPGLPTPSAIPDKSYIIVIDLKDCFYTIPLAPQDCKRFAFSLPSVNFKEPMQRYQWRVLPQGMTNSPTLCQKFVATAIAPVRQRFPQLYLVHYMDDILLAHTDEHLLYQAFSILKQHLSLNGLVIADEKIQTHFPYNYLGFSLYPRVYNTQLVKLQTDHLKTLNDFQKLLGDINWIRPYLKLPTYTLQPLFDILKGDSDPASPRTLSLEGRTALQSIEEAIRQQQITYCDYQRSWGLYILPTPRAPTGVLYQDKPLRWIYLSATPTKHLLPYYELVAKIIAKGRHEAIQYFGMEPPFICVPYALEQQDWLFQFSDNWSIAFANYPGQITHHYPSDKLLQFASSHAFIFPKIVRRQPIPEATLIFTDGSSNGTAALIINHQTYYAQTSFSSAQVVELFAVHQALLTVPTSFNLFTDSSYVVGALQMIETVPIIGTTSPEVLNLFTLIQQVLHCRQHPCFFGHIRAHSTLPGALVQGNHTADVLTKQVFFQS

SEQ ID NO: 8046 - protein, 581 aa, synthetic construct
PLGTSDSPVTHADPIDWKSEEPVWVDQWPLTQEKLSAAQQLVQEQLRLGHIEPSTSAWNSPIFVIKKKSGKWRLLQDLRKVNETMMHMGALQPGLPTPSPIPDKSYIIVIDLKDCFYTIPLAPQDCKRFAFSLPSVNFKEPMQRYQWRVLPQGMTNSPTLCQKFVATAIAPVRQRFPQLYLVHYMDDILLAHTDEHLLYQAFSILKQHLSLNGLVIADEKIQTHFPYNYLGFSLYPRVYNTQLVKLQTDHLKTLNDFQKLLGDINWIRPYLKLPTYTLQPLFDILKGDSDPASPRTLSLEGRTALQSIEEAIRQQQITYCDYQRSWGLYILPTPRAPTGVLYQDKPLRWIYLSATPTKHLLPYYELVAKIIAKGRHEAIQYFGMEPPFICVPYALEQQDWLFQFSDNWSIAFANYPGQITHHYPSDKLLQFASSHAFIFPKIVRRQPIPEATLIFTDGSSNGTAALIINHQTYYAQTSFSSAQVVELFAVHQALLTVPTSFNLFTDSSYVVGALQMIETVPIIGTTSPEVLNLFTLIQQVLHCRQHPCFFGHIRAHSTLPGALVQGNHTADVLTKQVFFQS

SEQ ID NO: 8047 - protein, 793 aa, Koala retrovirus
TLGDQGSRGSDPLPEPRVTLTVEGIPTEFLVNTGAEHSVLTKPMGKMGSKRTVVAGATGSKVYPWTTKRLLKIGQKQVTHSFLVIPECPAPLLGRDLLTKLKAQIQFSTEGPQVTWEDRPAMCLVLNLEEEYRLHEKPVPPSIDPSWLQLFPMVWAEKAGMGLANQVPPVVVELKSDASPVAVRQYPMSKEAREGIRPHIQRFLDLGILVPCQSPWNTPLLPVKKPGTNDYRPVQDLREVNKRVQDIHPTVPNPYNLLSSLPPSHTWYSVLDLKDAFFCLKLHPNSQPLFAFEWRDPEKGNTGQLTWTRLPQGFKNSPTLFDEALHRDLASFRALNPQVVMLQYVDDLLVAAPTYRDCKEGTRRLLQELSKLGYRVSAKKAQLCREEVTYLGYLLKGGKRWLTPARKATVMKIPTPTTPRQVREFLGTAGFCRLWIPGFASLAAPLYPLTREKVPFTWTEAHQEAFGRIKEALLSAPALALPDLTKPFALYVDEKEGVARGVLTQTLGPWRRPVAYLSKKLDPVASGWPTCLKAIAAVALLLKDADKLTLGQNVLVIAPHNLESIVRQPPDRWMTNARMTHYQSLLLNERVSFAPPAILNPATLLPVESDDTPIHICSEILAEETGTRPDLRDQPLPGVPAWYTDGSSFIMDGRRQAGAAIVDNKRTVWASNLPEGTSAQKAELIALTQALRLAEGKSINIYTDSRYAFATAHVHGAIYKQRGLLTSAGKDIKNKEEILALLEAIHLPKRVAIIHCPGHQRGTDPVATGNRKADEAAKQAAQSTRILTETTKN

SEQ ID NO: 8048 - protein, 793 aa, synthetic construct
TLGDQGSRGSDPLPEPRVTLTVEGIPTEFLVNTGAEHSVLTKPMGKMGSKRTVVAGATGSKVYPWTTKRLLKIGQKQVTHSFLVIPECPAPLLGRDLLTKLKAQIQFSTEGPQVTWEDRPAMCLVLNLEEEYRLHEKPVPPSIDPSWLQLFPMVWAEKAGMGLANQVPPVVVELKSDASPVAVRQYPMSKEAREGIRPHIQRFLDLGILVPCQSPWNTPLLPVKKPGTNDYRPVQDLREVNKRVQDIHPTVPNPYNLLSSLPPSHTWYSVLDLKDAFFCLKLHPNSQPLFAFEWRDPEKGNTGQLTWTRLPQGFKNSPTLFNEALHRDLASFRALNPQVVMLQYVDDLLVAAPTYRDCKEGTRRLLQELSKLGYRVSAKKAQLCREEVTYLGYLLKGGKRWLTPARKATVMKIPTPTTPRQVREFLGTAGFCRLWIPGFASLAAPLYPLTRPKVPFTWTEAHQEAFGRIKEALLSAPALALPDLTKPFALYVDEKEGVARGVLTQTLGPWRRPVAYLSKKLDPVASGWPTCLKAIAAVALLLKDADKLTLGQNVLVIAPHNLESIVRQPPDRWMTNARMTHYQSLLLNERVSFAPPAILNPATLLPVESDDTPIHICSEILAEETGTRPDLRDQPLPGVPAWYTDGSSFIMDGRRQAGAAIVDNKRTVWASNLPEGTSAQKAELIALTQALRLAEGKSINIYTDSRYAFATAHVHGAIYKQRGWLTSAGKDIKNKEEILALLEAIHLPKRVAIIHCPGHQRGTDPVATGNRKADEAAKQAAQSTRILTETTKN

SEQ ID NO: 8049 - protein, 793 aa, synthetic construct
TLGDQGSRGSDPLPEPRVTLTVEGIPTEFLVNTGAEHSVLTKPMGKMGSKRTVVAGATGSKVYPWTTKRLLKIGQKQVTHSFLVIPECPAPLLGRDLLTKLKAQIQFSTEGPQVTWEDRPAMCLVLNLEEEYRLHEKPVPPSIDPSWLQLFPMVWAEKAGMGLANQVPPVVVELKSDASPVAVRQYPMSKEAREGIRPHIQRFLDLGILVPCQSPWNTPLLPVKKPGTNDYRPVQDLREVNKRVQDIHPTVPNPYNLLSSLPPSHTWYSVLDLKDAFFCLKLHPNSQPLFAFEWRDPEKGNTGQLTWTRLPQGFKNSPTLFNEALHRDLASFRALNPQVVMLQYVDDLLVAAPTYRDCKEGTRRLLQELSKLGYRVSAKKAQLCREEVTYLGYLLKGGKRWLTPARKATVMKIPTPTTPRQVREFLGKAGFCRLFIPGFASLAAPLYPLTRPKVPFTWTEAHQEAFGRIKEALLSAPALALPDLTKPFALYVDEKEGVARGVLTQTLGPWRRPVAYLSKKLDPVASGWPTCLKAIAAVALLLKDADKLTLGQNVLVIAPHNLESIVRQPPDRWMTNARMTHYQSLLLNERVSFAPPAILNPATLLPVESDDTPIHICSEILAEETGTRPDLRDQPLPGVPAWYTDGSSFIMDGRRQAGAAIVDNKRTVWASNLPEGTSAQKAELIALTQALRLAEGKSINIYTDSRYAFATAHVHGAIYKQRGWLTSAGKDIKNKEEILALLEAIHLPKRVAIIHCPGHQRGTDPVATGNRKADEAAKQAAQSTRILTETTKN

SEQ ID NO: 8050 - protein, 702 aa, Koala retrovirus
LLGRDLLTKLKAQIQFSTEGPQVTWEDRPAMCLVLNLEEEYRLHEKPVPPSIDPSWLQLFPMVWAEKAGMGLANQVPPVVVELKSDASPVAVRQYPMSKEAREGIRPHIQRFLDLGILVPCQSPWNTPLLPVKKPGTNDYRPVQDLREVNKRVQDIHPTVPNPYNLLSSLPPSHTWYSVLDLKDAFFCLKLHPNSQPLFAFEWRDPEKGNTGQLTWTRLPQGFKNSPTLFDEALHRDLASFRALNPQVVMLQYVDDLLVAAPTYRDCKEGTRRLLQELSKLGYRVSAKKAQLCREEVTYLGYLLKGGKRWLTPARKATVMKIPTPTTPRQVREFLGTAGFCRLWIPGFASLAAPLYPLTREKVPFTWTEAHQEAFGRIKEALLSAPALALPDLTKPFALYVDEKEGVARGVLTQTLGPWRRPVAYLSKKLDPVASGWPTCLKAIAAVALLLKDADKLTLGQNVLVIAPHNLESIVRQPPDRWMTNARMTHYQSLLLNERVSFAPPAILNPATLLPVESDDTPIHICSEILAEETGTRPDLRDQPLPGVPAWYTDGSSFIMDGRRQAGAAIVDNKRTVWASNLPEGTSAQKAELIALTQALRLAEGKSINIYTDSRYAFATAHVHGAIYKQRGLLTSAGKDIKNKEEILALLEAIHLPKRVAIIHCPGHQRGTDPVATGNRKADEAAKQAAQSTRILTETTKN

SEQ ID NO: 8051 - protein, 702 aa, synthetic construct
LLGRDLLTKLKAQIQFSTEGPQVTWEDRPAMCLVLNLEEEYRLHEKPVPPSIDPSWLQLFPMVWAEKAGMGLANQVPPVVVELKSDASPVAVRQYPMSKEAREGIRPHIQRFLDLGILVPCQSPWNTPLLPVKKPGTNDYRPVQDLREVNKRVQDIHPTVPNPYNLLSSLPPSHTWYSVLDLKDAFFCLKLHPNSQPLFAFEWRDPEKGNTGQLTWTRLPQGFKNSPTLFNEALHRDLASFRALNPQVVMLQYVDDLLVAAPTYRDCKEGTRRLLQELSKLGYRVSAKKAQLCREEVTYLGYLLKGGKRWLTPARKATVMKIPTPTTPRQVREFLGTAGFCRLWIPGFASLAAPLYPLTRPKVPFTWTEAHQEAFGRIKEALLSAPALALPDLTKPFALYVDEKEGVARGVLTQTLGPWRRPVAYLSKKLDPVASGWPTCLKAIAAVALLLKDADKLTLGQNVLVIAPHNLESIVRQPPDRWMTNARMTHYQSLLLNERVSFAPPAILNPATLLPVESDDTPIHICSEILAEETGTRPDLRDQPLPGVPAWYTDGSSFIMDGRRQAGAAIVDNKRTVWASNLPEGTSAQKAELIALTQALRLAEGKSINIYTDSRYAFATAHVHGAIYKQRGWLTSAGKDIKNKEEILALLEAIHLPKRVAIIHCPGHQRGTDPVATGNRKADEAAKQAAQSTRILTETTKN

SEQ ID NO: 8052 - protein, 702 aa, synthetic construct
LLGRDLLTKLKAQIQFSTEGPQVTWEDRPAMCLVLNLEEEYRLHEKPVPPSIDPSWLQLFPMVWAEKAGMGLANQVPPVVVELKSDASPVAVRQYPMSKEAREGIRPHIQRFLDLGILVPCQSPWNTPLLPVKKPGTNDYRPVQDLREVNKRVQDIHPTVPNPYNLLSSLPPSHTWYSVLDLKDAFFCLKLHPNSQPLFAFEWRDPEKGNTGQLTWTRLPQGFKNSPTLFNEALHRDLASFRALNPQVVMLQYVDDLLVAAPTYRDCKEGTRRLLQELSKLGYRVSAKKAQLCREEVTYLGYLLKGGKRWLTPARKATVMKIPTPTTPRQVREFLGKAGFCRLFIPGFASLAAPLYPLTRPKVPFTWTEAHQEAFGRIKEALLSAPALALPDLTKPFALYVDEKEGVARGVLTQTLGPWRRPVAYLSKKLDPVASGWPTCLKAIAAVALLLKDADKLTLGQNVLVIAPHNLESIVRQPPDRWMTNARMTHYQSLLLNERVSFAPPAILNPATLLPVESDDTPIHICSEILAEETGTRPDLRDQPLPGVPAWYTDGSSFIMDGRRQAGAAIVDNKRTVWASNLPEGTSAQKAELIALTQALRLAEGKSINIYTDSRYAFATAHVHGAIYKQRGWLTSAGKDIKNKEEILALLEAIHLPKRVAIIHCPGHQRGTDPVATGNRKADEAAKQAAQSTRILTETTKN

SEQ ID NO: 8053 - protein, 671 aa, unidentified
TLNLEDEYRLYETSAEPEVSPGSTWLSDFPQAWAETGGMGLAVRQAPLIIPLKATSTPVSIKQYPMSQEAKLGIKPHIQRLLDQGILVPCQSPWNTPLLPVKKPGTNDYRPVQDLREVNKRVEDIHPTVPNPYNLLSGLPPSHRWYTVLDLKDAFFCLRLHPTSQPLFAFEWRDPGMGISGQLTWTRLPQGFKNSPTLFDEALHRDLADFRIQHPDLILLQYVDDILLAATSELDCQQGTRALLLTLGNLGYRASAKKAQLCQKQVKYLGYLLKEGQRWLTEARKETVMGQPTPKTPRQLREFLGTAGFCRLWIPGFAEMAAPLYPLTKTGTLFNWGPDQQKAYQEIKQALLTAPALGLPDLTKPFELFVDEKQGYAKGVLTQKLGPWRRPVAYLSKKLDPVAAGWPPCLRMVAAIAVLRKDAGKLTMGQPLVILAPHAVEALVKQPPDRWLSNARMTHYQAMLLDTDRVQFGPVVALNPATLLPLPEEGAPHDCLEILAETHGTRPDLTDQPIPDADHTWYTDGSSFLQEGQRKAGAAVTTETEVIWARALPAGTSAQRAELIALTQALKMAEGKRLNVYTDSRYAFATAHIHGEIYRRRGLLTSEGREIKNKSEILALLKALFLPKRLSIIHCLGHQKGDSAEARGNRLADQAAREAAIKTPPDTSTLL

SEQ ID NO: 8054 - protein, 671 aa, synthetic construct
TLNLEDEYRLYETSAEPEVSPGSTWLSDFPQAWAETGGMGLAVRQAPLIIPLKATSTPVSIKQYPMSQEAKLGIKPHIQRLLDQGILVPCQSPWNTPLLPVKKPGTNDYRPVQDLREVNKRVEDIHPTVPNPYNLLSGLPPSHRWYTVLDLKDAFFCLRLHPTSQPLFAFEWRDPGMGISGQLTWTRLPQGFKNSPTLFNEALHRDLADFRIQHPDLILLQYVDDILLAATSELDCQQGTRALLLTLGNLGYRASAKKAQLCQKQVKYLGYLLKEGQRWLTEARKETVMGQPTPKTPRQLREFLGTAGFCRLWIPGFAEMAAPLYPLTKPGTLFNWGPDQQKAYQEIKQALLTAPALGLPDLTKPFELFVDEKQGYAKGVLTQKLGPWRRPVAYLSKKLDPVAAGWPPCLRMVAAIAVLRKDAGKLTMGQPLVILAPHAVEALVKQPPDRWLSNARMTHYQAMLLDTDRVQFGPVVALNPATLLPLPEEGAPHDCLEILAETHGTRPDLTDQPIPDADHTWYTDGSSFLQEGQRKAGAAVTTETEVIWARALPAGTSAQRAELIALTQALKMAEGKRLNVYTDSRYAFATAHIHGEIYRRRGWLTSEGREIKNKSEILALLKALFLPKRLSIIHCLGHQKGDSAEARGNRLADQAAREAAIKTPPDTSTLL

SEQ ID NO: 8055 - protein, 671 aa, synthetic construct
TLNLEDEYRLYETSAEPEVSPGSTWLSDFPQAWAETGGMGLAVRQAPLIIPLKATSTPVSIKQYPMSQEAKLGIKPHIQRLLDQGILVPCQSPWNTPLLPVKKPGTNDYRPVQDLREVNKRVEDIHPTVPNPYNLLSGLPPSHRWYTVLDLKDAFFCLRLHPTSQPLFAFEWRDPGMGISGQLTWTRLPQGFKNSPTLFNEALHRDLADFRIQHPDLILLQYVDDILLAATSELDCQQGTRALLLTLGNLGYRASAKKAQLCQKQVKYLGYLLKEGQRWLTEARKETVMGQPTPKTPRQLREFLGKAGFCRLFIPGFAEMAAPLYPLTKPGTLFNWGPDQQKAYQEIKQALLTAPALGLPDLTKPFELFVDEKQGYAKGVLTQKLGPWRRPVAYLSKKLDPVAAGWPPCLRMVAAIAVLRKDAGKLTMGQPLVILAPHAVEALVKQPPDRWLSNARMTHYQAMLLDTDRVQFGPVVALNPATLLPLPEEGAPHDCLEILAETHGTRPDLTDQPIPDADHTWYTDGSSFLQEGQRKAGAAVTTETEVIWARALPAGTSAQRAELIALTQALKMAEGKRLNVYTDSRYAFATAHIHGEIYRRRGWLTSEGREIKNKSEILALLKALFLPKRLSIIHCLGHQKGDSAEARGNRLADQAAREAAIKTPPDTSTLL

SEQ ID NO: 8056 - protein, 671 aa, Murine leukemia virus
TLGIEDEYRLHETSTEPDVSLGSTWLSDFPQAWAETGGMGLAVRQAPLIIPLKATSTPVSIQQYPMSHEARLGIKPHIQRLLDQGILVPCQSPWNTPLLPVKKPGTNDYRPVQDLREVNKRVEDIHPTVPNPYNLLSGLPPSHQWYTVLDLKDAFFCLRLHPTSQPLFAFEWRDPGMGISGQLTWTRLPQGFKNSPTLFDEALHRDLADFRIQHPDLILLQYVDDILLAATSELDCQQGTRALLQTLGDLGYRASAKKAQICQKQVKYLGYLLREGQRWLTEARKETVMGQPVPKTPRQLREFLGTAGFCRLWIPGFAEMAAPLYPLTKTGTLFSWGPDQQKAYQEIKQALLTAPALGLPDLTKPFELFVDEKQGYAKGVLTQKLGPWRRPVAYLSKKLDPVAAGWPPCLRMVAAIAVLTKDAGKLTMGQPLVILAPHAVEALVKQPPDRWLSNARMTHYQAMLLDTDRVQFGPVVALNPATLLPLPEEGAPHDCLEILAETHGTRPDLTDQPIPDADHTWYTDGSSFLQEGQRKAGAAVTTETEVIWAGALPAGTSAQRAELIALTQALKMAEGKRLNVYTDSRYAFATAHIHGEIYRRRGLLTSEGREIKNKSEILALLKALFLPKRLSIIHCLGHQKGDSAEARGNRLADQAAREAAIKTPPDTSTLL

SEQ ID NO: 8057 - protein, 671 aa, Murine leukemia virus; identical to SEQ ID NO: 8056

SEQ ID NO: 8058 - protein, 671 aa, synthetic construct
TLGIEDEYRLHETSTEPDVSLGSTWLSDFPQAWAETGGMGLAVRQAPLIIPLKATSTPVSIQQYPMSHEARLGIKPHIQRLLDQGILVPCQSPWNTPLLPVKKPGTNDYRPVQDLREVNKRVEDIHPTVPNPYNLLSGLPPSHQWYTVLDLKDAFFCLRLHPTSQPLFAFEWRDPGMGISGQLTWTRLPQGFKNSPTLFNEALHRDLADFRIQHPDLILLQYVDDILLAATSELDCQQGTRALLQTLGDLGYRASAKKAQICQKQVKYLGYLLREGQRWLTEARKETVMGQPVPKTPRQLREFLGTAGFCRLWIPGFAEMAAPLYPLTKPGTLFSWGPDQQKAYQEIKQALLTAPALGLPDLTKPFELFVDEKQGYAKGVLTQKLGPWRRPVAYLSKKLDPVAAGWPPCLRMVAAIAVLTKDAGKLTMGQPLVILAPHAVEALVKQPPDRWLSNARMTHYQAMLLDTDRVQFGPVVALNPATLLPLPEEGAPHDCLEILAETHGTRPDLTDQPIPDADHTWYTDGSSFLQEGQRKAGAAVTTETEVIWAGALPAGTSAQRAELIALTQALKMAEGKRLNVYTDSRYAFATAHIHGEIYRRRGWLTSEGREIKNKSEILALLKALFLPKRLSIIHCLGHQKGDSAEARGNRLADQAAREAAIKTPPDTSTLL

SEQ ID NO: 8059 - protein, 671 aa, synthetic construct; identical to SEQ ID NO: 8058

SEQ ID NO: 8060 - protein, 671 aa, synthetic construct
LGIEDEYRLHETSTEPDVSLGSTWLSDFPQAWAETGGMGLAVRQAPLIIPLKATSTPVSIQQYPMSHEARLGIKPHIQRLLDQGILVPCQSPWNTPLLPVKKPGTNDYRPVQDLREVNKRVEDIHPTVPNPYNLLSGLPPSHQWYTVLDLKDAFFCLRLHPTSQPLFAFEWRDPGMGISGQLTWTRLPQGFKNSPTLFNEALHRDLADFRIQHPDLILLQYVDDILLAATSELDCQQGTRALLQTLGDLGYRASAKKAQICQKQVKYLGYLLREGQRWLTEARKETVMGQPVPKTPRQLREFLGKAGFCRLFIPGFAEMAAPLYPLTKPGTLFSWGPDQQKAYQEIKQALLTAPALGLPDLTKPFELFVDEKQGYAKGVLTQKLGPWRRPVAYLSKKLDPVAAGWPPCLRMVAAIAVLTKDAGKLTMGQPLVILAPHAVEALVKQPPDRWLSNARMTHYQAMLLDTDRVQFGPVVALNPATLLPLPEEGAPHDCLEILAETHGTRPDLTDQPIPDADHTWYTDGSSFLQEGQRKAGAAVTTETEVIWAGALPAGTSAQRAELIALTQALKMAEGKRLNVYTDSRYAFATAHIHGEIYRRRGWLTSEGREIKNKSEILALLKALFLPKRLSIIHCLGHQKGDSAEARGNRLADQAAREAAIKTPPDTSTLLI

SEQ ID NO: 8061 - protein, 671 aa, synthetic construct; identical to SEQ ID NO: 8060

SEQ ID NO: 8062 - protein, 671 aa, unidentified
TLNIEDEYRLHETSKEPDVSLGSTWLSDFPQAWAETGGMGLAVRQAPLIIPLKATSTPVSIKQYPMSQEARLGIKPHIQRLLDQGILVPCQSPWNTPLLPVKKPGTNDYRPVQDLREVNKRVEDIHPTVPNPYNLLSGLPPSHQWYTVLDLKDAFFCLRLHPTSQPLFAFEWRDPEMGISGQLTWTRLPQGFKNSPTLFDEALHRDLAGFRIQHPDLILLQYVDDLLLAATSELDCQQGTRALLQTLGDLGYRASAKKAQICQKQVKYLGYLLKEGQRWLTEARKETVMGQPIPKTPRQLREFLGTAGFCRLWIPGFAEMAAPLYPLTKTGTLFNWGPDQQKAFQEIKQALLTAPALGLPDLTKPFELFVDEKQGYAKGVLTQKLGPWRRPVAYLSKKLDPVAAGWPPCLRMVAAIAVLTKDAGKLTMGQPLVILAPHAVEALVKQPPDRWLSNARMTHYQALLLDTDRVQFGPVVALNPATLLPLPEEGLQHDCLDILAEAHGTRSDLMDQPLPDADHTWYTDGSSFLQEGQRKAGAAVTTETEVIWARALPAGTSAQRAELIALTQALKMAEGKKLNVYTDSRYAFATAHIHGEIYRRRGLLTSEGKEIKNKDEILALLKALFLPKRLSIIHCPGHQKGNSAEARGNRMADQAAREVATRETPETSTLL

SEQ ID NO: 8063 - protein, 671 aa, synthetic construct
TLNIEDEYRLHETSKEPDVSLGSTWLSDFPQAWAETGGMGLAVRQAPLIIPLKATSTPVSIKQYPMSQEARLGIKPHIQRLLDQGILVPCQSPWNTPLLPVKKPGTNDYRPVQDLREVNKRVEDIHPTVPNPYNLLSGLPPSHQWYTVLDLKDAFFCLRLHPTSQPLFAFEWRDPEMGISGQLTWTRLPQGFKNSPTLFNEALHRDLAGFRIQHPDLILLQYVDDLLLAATSELDCQQGTRALLQTLGDLGYRASAKKAQICQKQVKYLGYLLKEGQRWLTEARKETVMGQPIPKTPRQLREFLGTAGFCRLWIPGFAEMAAPLYPLTKPGTLFNWGPDQQKAFQEIKQALLTAPALGLPDLTKPFELFVDEKQGYAKGVLTQKLGPWRRPVAYLSKKLDPVAAGWPPCLRMVAAIAVLTKDAGKLTMGQPLVILAPHAVEALVKQPPDRWLSNARMTHYQALLLDTDRVQFGPVVALNPATLLPLPEEGLQHDCLDILAEAHGTRSDLMDQPLPDADHTWYTDGSSFLQEGQRKAGAAVTTETEVIWARALPAGTSAQRAELIALTQALKMAEGKKLNVYTDSRYAFATAHIHGEIYRRRGWLTSEGKEIKNKDEILALLKALFLPKRLSIIHCPGHQKGNSAEARGNRMADQAAREVATRETPETSTLL

SEQ ID NO: 8064 - protein, 671 aa, synthetic construct
TLNIEDEYRLHETSKEPDVSLGSTWLSDFPQAWAETGGMGLAVRQAPLIIPLKATSTPVSIKQYPMSQEARLGIKPHIQRLLDQGILVPCQSPWNTPLLPVKKPGTNDYRPVQDLREVNKRVEDIHPTVPNPYNLLSGLPPSHQWYTVLDLKDAFFCLRLHPTSQPLFAFEWRDPEMGISGQLTWTRLPQGFKNSPTLFNEALHRDLAGFRIQHPDLILLQYVDDLLLAATSELDCQQGTRALLQTLGDLGYRASAKKAQICQKQVKYLGYLLKEGQRWLTEARKETVMGQPIPKTPRQLREFLGKAGFCRLFIPGFAEMAAPLYPLTKPGTLFNWGPDQQKAFQEIKQALLTAPALGLPDLTKPFELFVDEKQGYAKGVLTQKLGPWRRPVAYLSKKLDPVAAGWPPCLRMVAAIAVLTKDAGKLTMGQPLVILAPHAVEALVKQPPDRWLSNARMTHYQALLLDTDRVQFGPVVALNPATLLPLPEEGLQHDCLDILAEAHGTRSDLMDQPLPDADHTWYTDGSSFLQEGQRKAGAAVTTETEVIWARALPAGTSAQRAELIALTQALKMAEGKKLNVYTDSRYAFATAHIHGEIYRRRGWLTSEGKEIKNKDEILALLKALFLPKRLSIIHCPGHQKGNSAEARGNRMADQAAREVATRETPETSTLL

SEQ ID NO: 8065 - protein, 671 aa, unidentified
TLNIEDEYRLHETSKGPDVPLGSTWLSDFPQAWAETGGMGLAFRQAPLIISLKATSTPVSIKQYPMSQEARLGIKPHIQRLLDQGILVPCQSPWNTPLLPVKKPGTNDYRPVQDLREVNKRVEDIHPTVPNPYNLLSGLPPSHQWYTVLDLKDAFFCLRLHPTSQSLFAFEWKDPEMGISGQLTWTRLPQGFKNSPTLFDEALHRDLADFRIQHPDLILLQYVDDLLLAATSELDCQQGTRALLQTLGDLGYRASAKKAQICQKQVKYLGYLLKEGQRWLTEARKETVMGQPTPKTPRQLREFLGTAGLCRLWIPGFAEMAAPLYPLTKTGTLFKWGPDQQKAYQEIKQALLTAPALGLPDLTKPFELFVDEKQGYAKGVLTQKLGPWRRPVAYLSKKLDPVAAGWPPCLRMVAAIAVLTKDVGKLTMGQPLVILAPHAVEALVKQPPDRWLSNARMTHYQALLLDTDRVQFGPIVALNPATLLPLPEEGLQHDCLDILAEAHGTRPDLTDQPLPDADHTWYTDGSSFLQEGQRRAGAAVTTETEVIWAKALPAGTSAQRAELIALTQALKMAAGKKLNVYTDSRYAFATAHIHGEIYRRRGLLTSEGKEIKNKDEILALLKALFLPKRLSIIHCPGHQKGNHAEARGNRMADQAAREVATRETPETSTLL

SEQ ID NO: 8066 - protein, 671 aa, synthetic construct
TLNIEDEYRLHETSKGPDVPLGSTWLSDFPQAWAETGGMGLAFRQAPLIISLKATSTPVSIKQYPMSQEARLGIKPHIQRLLDQGILVPCQSPWNTPLLPVKKPGTNDYRPVQDLREVNKRVEDIHPTVPNPYNLLSGLPPSHQWYTVLDLKDAFFCLRLHPTSQSLFAFEWKDPEMGISGQLTWTRLPQGFKNSPTLFNEALHRDLADFRIQHPDLILLQYVDDLLLAATSELDCQQGTRALLQTLGDLGYRASAKKAQICQKQVKYLGYLLKEGQRWLTEARKETVMGQPTPKTPRQLREFLGTAGLCRLWIPGFAEMAAPLYPLTKPGTLFKWGPDQQKAYQEIKQALLTAPALGLPDLTKPFELFVDEKQGYAKGVLTQKLGPWRRPVAYLSKKLDPVAAGWPPCLRMVAAIAVLTKDVGKLTMGQPLVILAPHAVEALVKQPPDRWLSNARMTHYQALLLDTDRVQFGPIVALNPATLLPLPEEGLQHDCLDILAEAHGTRPDLTDQPLPDADHTWYTDGSSFLQEGQRRAGAAVTTETEVIWAKALPAGTSAQRAELIALTQALKMAAGKKLNVYTDSRYAFATAHIHGEIYRRRGWLTSEGKEIKNKDEILALLKALFLPKRLSIIHCPGHQKGNHAEARGNRMADQAAREVATRETPETSTLL

SEQ ID NO: 8067 - protein, 671 aa, synthetic construct
TLNIEDEYRLHETSKGPDVPLGSTWLSDFPQAWAETGGMGLAFRQAPLIISLKATSTPVSIKQYPMSQEARLGIKPHIQRLLDQGILVPCQSPWNTPLLPVKKPGTNDYRPVQDLREVNKRVEDIHPTVPNPYNLLSGLPPSHQWYTVLDLKDAFFCLRLHPTSQSLFAFEWKDPEMGISGQLTWTRLPQGFKNSPTLFNEALHRDLADFRIQHPDLILLQYVDDLLLAATSELDCQQGTRALLQTLGDLGYRASAKKAQICQKQVKYLGYLLKEGQRWLTEARKETVMGQPTPKTPRQLREFLGKAGLCRLFIPGFAEMAAPLYPLTKPGTLFKWGPDQQKAYQEIKQALLTAPALGLPDLTKPFELFVDEKQGYAKGVLTQKLGPWRRPVAYLSKKLDPVAAGWPPCLRMVAAIAVLTKDVGKLTMGQPLVILAPHAVEALVKQPPDRWLSNARMTHYQALLLDTDRVQFGPIVALNPATLLPLPEEGLQHDCLDILAEAHGTRPDLTDQPLPDADHTWYTDGSSFLQEGQRRAGAAVTTETEVIWAKALPAGTSAQRAELIALTQALKMAAGKKLNVYTDSRYAFATAHIHGEIYRRRGWLTSEGKEIKNKDEILALLKALFLPKRLSIIHCPGHQKGNHAEARGNRMADQAAREVATRETPETSTLL

SEQ ID NO: 8068 - protein, 671 aa, synthetic construct
TLNIEDEYRLHETSKGPDVPLGSTWLSDFPQAWAETGGMGLAVRQAPLIIPLKATSTPVSIKQYPMSQEARLGIKPHIQRLLDQGILVPCQSPWNTPLLPVKKPGTNDYRPVQDLREVNKRVEDIHPTVPNPYNLLSGLPPSHQWYTVLDLKDAFFCLRLHPTSQSLFAFEWRDPEMGISGQLTWTRLPQGFKNSPTLFNEALHRDLADFRIQHPDLILLQYVDDLLLAATSELDCQQGTRALLQTLGDLGYRASAKKAQICQKQVKYLGYLLKEGQRWLTEARKETVMGQPTPKTPRQLREFLGTAGFCRLWIPGFAEMAAPLYPLTKPGTLFEWGPDQQKAYQEIKQALLTAPALGLPDLTKPFELFVDEKQGYAKGVLTQKLGPWRRPVAYLSKKLDPVAAGWPPCLRMVAAIAVLTKDAGKLTMGQPLVILAPHAVEALVKQPPDRWLSNARMTHYQALLLDTDRVQFGPIVALNPATLLPLPEEGLQHDCLDILAEAHGTRPDLTDQPLPDADHTWYTDGSSFLQEGQRKAGAAVTTETEVVWAKALPAGTSAQRAELIALTQALKMAEGKKLNVYTDSRYAFATAHIHGEIYRRRGWLTSEGKEIKNKDEILALLKALFLPKRLSIIHCPGHQKGNRAEARGNRMADQAAREVATRETPETSTLL

SEQ ID NO: 8069 - protein, 671 aa, synthetic construct
TLNIEDEYRLHETSKGPDVPLGSTWLSDFPQAWAETGGMGLAVRQAPLIIPLKATSTPVSIKQYPMSQEARLGIKPHIQRLLDQGILVPCQSPWNTPLLPVKKPGTNDYRPVQDLREVNKRVEDIHPTVPNPYNLLSGLPPSHQWYTVLDLKDAFFCLRLHPTSQSLFAFEWRDPEMGISGQLTWTRLPQGFKNSPTLFNEALHRDLADFRIQHPDLILLQYVDDLLLAATSELDCQQGTRALLQTLGDLGYRASAKKAQICQKQVKYLGYLLKEGQRWLTEARKETVMGQPTPKTPRQLREFLGKAGFCRLFIPGFAEMAAPLYPLTKPGTLFEWGPDQQKAYQEIKQALLTAPALGLPDLTKPFELFVDEKQGYAKGVLTQKLGPWRRPVAYLSKKLDPVAAGWPPCLRMVAAIAVLTKDAGKLTMGQPLVILAPHAVEALVKQPPDRWLSNARMTHYQALLLDTDRVQFGPIVALNPATLLPLPEEGLQHDCLDILAEAHGTRPDLTDQPLPDADHTWYTDGSSFLQEGQRKAGAAVTTETEVVWAKALPAGTSAQRAELIALTQALKMAEGKKLNVYTDSRYAFATAHIHGEIYRRRGWLTSEGKEIKNKDEILALLKALFLPKRLSIIHCPGHQKGNRAEARGNRMADQAAREVATRETPETSTLL

SEQ ID NO: 8070 - protein, 671 aa, Murine leukemia virus; identical to SEQ ID NO: 5003

SEQ ID NO: 8071 - protein, 671 aa, Murine leukemia virus; identical to SEQ ID NO: 5003

SEQ ID NO: 8072 - protein, 671 aa, synthetic construct
TLNIEDEHRLHETSKEPDVSLGSTWLSDFPQAWAETGGMGLAVRQAPLIIPLKATSTPVSIKQYPMSQEARLGIKPHIQRLLDQGILVPCQSPWNTPLLPVKKPGTNDYRPVQDLREVNKRVEDIHPTVPNPYNLLSGLPPSHQWYTVLDLKDAFFCLRLHPTSQPLFAFEWRDPEMGISGQLTWTRLPQGFKNSPTLFNEALHRDLADFRIQHPDLILLQYVDDLLLAATSELDCQQGTRALLQTLGNLGYRASAKKAQICQKQVKYLGYLLKEGQRWLTEARKETVMGQPTPKTPRQLREFLGTAGFCRLWIPGFAEMAAPLYPLTKPGTLFNWGPDQQKAYQEIKQALLTAPALGLPDLTKPFELFVDEKQGYAKGVLTQKLGPWRRPVAYLSKKLDPVAAGWPPCLRMVAAIAVLTKDAGKLTMGQPLVILAPHAVEALVKQPPDRWLSNARMTHYQALLLDTDRVQFGPVVALNPATLLPLPEEGLQHNCLDILAEAHGTRPDLTDQPLPDADHTWYTDGSSLLQEGQRKAGAAVTTETEVIWAKALPAGTSAQRAELIALTQALKMAEGKKLNVYTDSRYAFATAHIHGEIYRRRGWLTSEGKEIKNKDEILALLKALFLPKRLSIIHCPGHQKGHSAEARGNRMADQAARKAAITETPDTSTLL

SEQ ID NO: 8073 - protein, 671 aa, synthetic construct; identical to SEQ ID NO: 8072

SEQ ID NO: 8074 - protein, 671 aa, synthetic construct
TLNIEDEHRLHETSKEPDVSLGSTWLSDFPQAWAETGGMGLAVRQAPLIIPLKATSTPVSIKQYPMSQEARLGIKPHIQRLLDQGILVPCQSPWNTPLLPVKKPGTNDYRPVQDLREVNKRVEDIHPTVPNPYNLLSGLPPSHQWYTVLDLKDAFFCLRLHPTSQPLFAFEWRDPEMGISGQLTWTRLPQGFKNSPTLFNEALHRDLADFRIQHPDLILLQYVDDLLLAATSELDCQQGTRALLQTLGNLGYRASAKKAQICQKQVKYLGYLLKEGQRWLTEARKETVMGQPTPKTPRQLREFLGKAGFCRLFIPGFAEMAAPLYPLTKPGTLFNWGPDQQKAYQEIKQALLTAPALGLPDLTKPFELFVDEKQGYAKGVLTQKLGPWRRPVAYLSKKLDPVAAGWPPCLRMVAAIAVLTKDAGKLTMGQPLVILAPHAVEALVKQPPDRWLSNARMTHYQALLLDTDRVQFGPVVALNPATLLPLPEEGLQHNCLDILAEAHGTRPDLTDQPLPDADHTWYTDGSSLLQEGQRKAGAAVTTETEVIWAKALPAGTSAQRAELIALTQALKMAEGKKLNVYTDSRYAFATAHIHGEIYRRRGWLTSEGKEIKNKDEILALLKALFLPKRLSIIHCPGHQKGHSAEARGNRMADQAARKAAITETPDTSTLL

SEQ ID NO: 8075 - protein, 671 aa, synthetic construct; identical to SEQ ID NO: 8074

SEQ ID NO: 8076 - protein, 691 aa, synthetic construct
TLNIEDEYRLHETSKEPDVSLGSTWLSDFPQAWAETGGMGLAVRQAPLIIPLKATSTPVSIKQYPMSQEARLGIKPHIQRLLDQGILVPCQSPWNTPLLPVKKPGTNDYRPVQDLREVNKRVEDIHPTVPNPYNLLSGLPPSHQWYTVLDLKDAFFCLRLHPTSQPLFAFEWRDPEMGISGQLTWTRLPQGFKNSPTLFNEALHRDLADFRIQHPDLILLQYVDDLLLAATSELDCQQGTRALLQTLGNLGYRASAKKAQICQKQVKYLGYLLKEGQRWLTEARKETVMGQPTPKTPRQLREFLGKAGFCRLFIPGFAEMAAPLYPLTKPGTLFNWGPDQQKAYQEIKQALLTAPALGLPDLTKPFELFVDEKQGYAKGVLTQKLGPWRRPVAYLSKKLDPVAAGWPPCLRMVAAIAVLTKDAGKLTMGQPLVILAPHAVEALVKQPPDRWLSNARMTHYQALLLDTDRVQFGPVVALNPATLLPLPEEGLQHNCLDILAEAHGTRPDLTDQPLPDADHTWYTDGSSLLQEGQRKAGAAVTTETEVIWAKALPAGTSAQRAELIALTQALKMAEGKKLNVYTDSRYAFATAHIHGEIYRRRGWLTSEGKEIKNKDEILALLKALFLPKRLSIIHCPGHQKGHSAEARGNRMADQAARKAAITETPDTSTLLIENSSPSGGSKRTADGSEFE

SEQ ID NO: 8077 - protein, 691 aa, synthetic construct; identical to SEQ ID NO: 8076

SEQ ID NO: 8078 - protein, 671 aa, unidentified
TLNIEDEYRLHEISTEPDVSPGSTWLSDFPQAWAETGGMGLAVRQAPLIIPLKATSTPVSIKQYPMSQEAKLGIKPHIQRLLDQGILVPCQSPWNTPLLPVKKPGTNDYRPVQGLREVNKRVEDIHPTVPNPYNLLSGLPTSHRWYTVLDLKDAFFCLRLHPTSQPLFASEWRDPGMGISGQLTWTRLPQGFKNSPTLFDEALHRGLADFRIQHPDLILLQYVDDLLLAATSELDCQQGTRALLKTLGNLGYRASAKKAQICQKQVKYLGYLLREGQRWLTEARKETVMGQPTPKTPRQLREFLGTAGFCRLWIPRFAEMAAPLYPLTKTGTLFNWGPDQQKAYHEIKQALLTAPALGLPDLTKPFELFVDEKQGYAKGVLTQKLGPWRRPVAYLSKKLDPVAAGWPPCLRMVAAIAVLTKDAGKLTMGQPLVILAPHAVEALVKQPPDRWLSNARMTHYQAMLLDTDRVQFGPVVALNPATLLPLPEEGAPHDCLEILAETHGTEPDLTDQPIPDADHTWYTDGSSFLQEGQRKAGAAVTTETEVIWARALPAGTSAQRAELIALTQALKMAEGKRLNVYTDSRYAFATAHIHGEIYKRRGLLTSEGREIKNKSEILALLKALFLPKRLSIIHCLGHQKGDSAEARGNRLADQAAREAAIKTPPDTSTLL

SEQ ID NO: 8079 - protein, 671 aa, synthetic construct
TLNIEDEYRLHEISTEPDVSPGSTWLSDFPQAWAETGGMGLAVRQAPLIIPLKATSTPVSIKQYPMSQEAKLGIKPHIQRLLDQGILVPCQSPWNTPLLPVKKPGTNDYRPVQGLREVNKRVEDIHPTVPNPYNLLSGLPTSHRWYTVLDLKDAFFCLRLHPTSQPLFASEWRDPGMGISGQLTWTRLPQGFKNSPTLFNEALHRGLADFRIQHPDLILLQYVDDLLLAATSELDCQQGTRALLKTLGNLGYRASAKKAQICQKQVKYLGYLLREGQRWLTEARKETVMGQPTPKTPRQLREFLGTAGFCRLWIPRFAEMAAPLYPLTKPGTLFNWGPDQQKAYHEIKQALLTAPALGLPDLTKPFELFVDEKQGYAKGVLTQKLGPWRRPVAYLSKKLDPVAAGWPPCLRMVAAIAVLTKDAGKLTMGQPLVILAPHAVEALVKQPPDRWLSNARMTHYQAMLLDTDRVQFGPVVALNPATLLPLPEEGAPHDCLEILAETHGTEPDLTDQPIPDADHTWYTDGSSFLQEGQRKAGAAVTTETEVIWARALPAGTSAQRAELIALTQALKMAEGKRLNVYTDSRYAFATAHIHGEIYKRRGWLTSEGREIKNKSEILALLKALFLPKRLSIIHCLGHQKGDSAEARGNRLADQAAREAAIKTPPDTSTLL

SEQ ID NO: 8080 - protein, 691 aa, Mouse mammary tumor virus
WVQEISDSRPMLHIYLNGRRFLGLLNTGADKTCIAGRDWPANWPIHQTESSLQGLGMACGVARSSQPLRWQHEDKSGIIHPFVIPTLPFTLWGRDIMKDIKVRLMTDSPDDSQDLMIGAIESNLFADQISWKSDQPVWLNQWPLKQEKLQALQQLVTEQLQLGHLEESNSPWNTPVFVIKKKSGKWRLLQDLRAVNATMHDMGALQPGLPSPVAVPKGWEIIIIDLQDCFFNIKLHPEDCKRFAFSVPSPNFKRPYQRFQWKVLPQGMKNSPTLCQKFVDKAILTVRDKYQDSYIVHYMDDILLAHPSRSIVDEILTSMIQALNKHGLVVSTEKIQKYDNLKYLGTHIQGDSVSYQKLQIRTDKLRTLNDFQKLLGNINWIRPFLKLTTGELKPLFEILNGDSNPISTRKLTPEACKALQLMNERLSTARVKRLDLSQPWSLCILKTEYTPTACLWQDGVVEWIHLPHISPKVITPYDIFCTQLIIKGRHRSKELFSKDPDYIVVPYTKVQFDLLLQEKEDWPISLLGFLGEVHFHLPKDPLLTFTLQTAIIFPHMTSTTPLEKGIVIFTDGSANGRSVTYIQGREPIIKENTQNTAQQAEIVAVITAFEEVSQPFNLYTDSKYVTGLFPEIETATLSPRTKIYTELKHLQRLIHKRQEKFYIGHIRGHTGLPGPLAQGNAYADSLTRILT

SEQ ID NO: 8081 - protein, 691 aa, Mouse mammary tumor virus; identical to SEQ ID NO: 8080

SEQ ID NO: 8082 - protein, 691 aa, synthetic construct
WVQEISDSRPMLHIYLNGRRFLGLLNTGADKTCIAGRDWPANWPIHQTESSLQGLGMACGVARSSQPLRWQHEDKSGIIHPFVIPTLPFTLWGRDIMKDIKVRLMTDSPDDSQDLMIGAIESNLFADQISWKSDQPVWLNQWPLKQEKLQALQQLVTEQLQLGHLEESNSPWNTPVFVIKKKSGKWRLLQDLRAVNATMHDMGALQPGLPSPVAVPKGWEIIIIDLQDCFFNIKLHPEDCKRFAFSVPSPNFKRPYQRFQWKVLPQGMKNSPTLCQKFVDKAILTVRDKYQDSYIVHYMDDILLAHPSRSIVDEILTSMIQALNKHGLVVSTEKIQKYDNLKYLGTHIQGDSVSYQKLQIRTDKLRTLNDFQKLLGNINWIRPFLKLTTGELKPLFEILNPDSNPISTRKLTPEACKALQLMNERLSTARVKRLDLSQPWSLCILKTEYTPTACLWQDGVVEWIHLPHISPKVITPYDIFCTQLIIKGRHRSKELFSKDPDYIVVPYTKVQFDLLLQEKEDWPISLLGFLGEVHFHLPKDPLLTFTLQTAIIFPHMTSTTPLEKGIVIFTDGSANGRSVTYIQGREPIIKENTQNTAQQAEIVAVITAFEEVSQPFNLYTDSKYVTGLFPEIETATLSPRTKIYTELKHLQRLIHKRQEKFYIGHIRGHTGLPGPLAQGNAYADSLTRILT

SEQ ID NO: 8083 - protein, 691 aa, synthetic construct
VQEISDSRPMLHIYLNGRRFLGLLDTGADKTCIAGRDWPANWPIHQTESSLQGLGMACGVARSSQPLRWQHEDKSGIIHPFVIPTLPFTLWGRDIMKDIKVRLMTDSPDDSQDLMIGAIESNLFADQISWKSDQPVWLNQWPLKQEKLQALQQLVTEQLQLGHLEESNSPWNTPVFVIKKKSGKWRLLQDLRAVNATMHDMGALQPGLPSPVAVPKGWEIIIIDLQDCFFNIKLHPEDCKRFAFSVPSPNFKRPYQRFQWKVLPQGMKNSPTLCQKFVDKAILTVRDKYQDSYIVHYMDDILLAHPSRSIVDEILTSMIQALNKHGLVVSTEKIQKYDNLKYLGTHIQGDSVSYQKLQIRTDKLRTLNDFQKLLGNINWIRPFLKLTTGELKPLFEILNPDSNPISTRKLTPEACKALQLMNERLSTARVKRLDLSQPWSLCILKTEYTPTACLWQDGVVEWIHLPHISPKVITPYDIFCTQLIIKGRHRSKELFSKDPDYIVVPYTKVQFDLLLQEKEDWPISLLGFLGEVHFHLPKDPLLTFTLQTAIIFPHMTSTTPLEKGIVIFTDGSANGRSVTYIQGREPIIKENTQNTAQQAEIVAVITAFEEVSQPFNLYTDSKYVTGLFPEIETATLSPRTKIYTELKHLQRLIHKRQEKFYIGHIRGHTGLPGPLAQGNAYADSLTRILTA

SEQ ID NO: 8084 - protein, 691 aa, synthetic construct; identical to SEQ ID NO: 8083

SEQ ID NO: 8085 - protein, 691 aa, synthetic construct
WVQEISDSRPMLHIYLNGRRFLGLLNTGADKTCIAGRDWPANWPIHQTESSLQGLGMACGVARSSQPLRWQHEDKSGIIHPFVIPTLPFTLWGRDIMKDIKVRLMTDSPDDSQDLMIGAIESNLFADQISWKSDQPVWLNQWPLKQEKLQALQQLVTEQLQLGHLEESNSPWNTPVFVIKKKSGKWRLLQDLRAVNATMHDMGALQPGLPSPVAPPKGWEIIIIDLQDCFFNIKLHPEDCKRFAFSVPSPNFKRPYQRFQWKVLPQGMKNSPTLCQKFVDKAILTVRDKYQDSYIVHYMDDILLAHPSRSIVDEILTSMIQALNKHGLVVSTEKIQKYDNLKYLGTHIQGDSVSYQKLQIRTDKLRTLNDFQKLLGNINWIRPFLKLTTGELKPLFEILNPDSNPISTRKLTPEACKALQLMNERLSTARVKRLDLSQPWSLCILKTEYTPTACLWQDGVVEWIHLPHISPKVITPYDIFCTQLIIKGRHRSKELFSKDPDYIVVPYTKVQFDLLLQEKEDWPISLLGFLGEVHFHLPKDPLLTFTLQTAIIFPHMTSTTPLEKGIVIFTDGSANGRSVTYIQGREPIIKENTQNTAQQAEIVAVITAFEEVSQPFNLYTDSKYVTGLFPEIETATLSPRTKIYTELKHLQRLIHKRQEKFYIGHIRGHTGLPGPLAQGNAYADSLTRILT

SEQ ID NO: 8086 - protein, 691 aa, synthetic construct; identical to SEQ ID NO: 8085

SEQ ID NO: 8087 - protein, 691 aa, synthetic construct
VQEISDSRPMLHIYLNGRRFLGLLDTGADKTCIAGRDWPANWPIHQTESSLQGLGMACGVARSSQPLRWQHEDKSGIIHPFVIPTLPFTLWGRDIMKDIKVRLMTDSPDDSQDLMIGAIESNLFADQISWKSDQPVWLNQWPLKQEKLQALQQLVTEQLQLGHLEESNSPWNTPVFVIKKKSGKWRLLQDLRAVNATMHDMGALQPGLPSPPAVPKGWEIIIIDLQDCFFNIKLHPEDCKRFAFSVPSPNFKRPYQRFQWKVLPQGMKNSPTLCQKFVDKAILTVRDKYQDSYIVHYMDDILLAHPSRSIVDEILTSMIQALNKHGLVVSTEKIQKYDNLKYLGTHIQGDSVSYQKLQIRTDKLRTLNDFQKLLGNINWIRPFLKLTTGELKPLFEILNPDSNPISTRKLTPEACKALQLMNERLSTARVKRLDLSQPWSLCILKTEYTPTACLWQDGVVEWIHLPHISPKVITPYDIFCTQLIIKGRHRSKELFSKDPDYIVVPYTKVQFDLLLQEKEDWPISLLGFLGEVHFHLPKDPLLTFTLQTAIIFPHMTSTTPLEKGIVIFTDGSANGRSVTYIQGREPIIKENTQNTAQQAEIVAVITAFEEVSQPFNLYTDSKYVTGLFPEIETATLSPRTKIYTELKHLQRLIHKRQEKFYIGHIRGHTGLPGPLAQGNAYADSLTRILTA

SEQ ID NO: 8088 - protein, 691 aa, synthetic construct; identical to SEQ ID NO: 8087

SEQ ID NO: 8089 - protein, 691 aa, Mouse mammary tumor virus
VQEISDSRPMLHIYLNGRRFLGLLDTGADKTCIAGRDWPANWPIHQTESSLQGLGMACGVARSSQPLRWQHEDKSGIIHPFVIPTLPFTLWGRDIMKDIKVRLMTDSPDDSQDLMIGAIESNLFADQISWKSDQPVWLNQWPLKQEKLQALQQLVTEQLQLGHLEESNSPWNTPVFVIKKKSGKWRLLQDLRAVNATMHDMGALQPGLPSPVAVPKGWEIIIIDLQDCFFNIKLHPEDCKRFAFSVPSPNFKRPYQRFQWKVLPQGMKNSPTLCQKFVDKAILTVRDKYQDSYIVHYMDDILLAHPSRSIVDEILTSMIQALNKHGLVVSTEKIQKYDNLKYLGTHIQGDSVSYQKLQIRTDKLRTLNDFQKLLGNINWIRPFLKLTTGELKPLFEILNGDSNPISTRKLTPEACKALQLMNERLSTARVKRLDLSQPWSLCILKTEYTPTACLWQDGVVEWIHLPHISPKVITPYDIFCTQLIIKGRHRSKELFSKDPDYIVVPYTKVQFDLLLQEKEDWPISLLGFLGEVHFHLPKDPLLTFTLQTAIIFPHMTSTTPLEKGIVIFTDGSANGRSVTYIQGREPIIKENTQNTAQQAEIVAVITAFEEVSQPFNLYTDSKYVTGLFPEIETATLSPRTKIYTELKHLQRLIHKRQEKFYIGHIRGHTGLPGPLAQGNAYADSLTRILTA

SEQ ID NO: 8090 - protein, 691 aa, Mouse mammary tumor virus; identical to SEQ ID NO: 8089

SEQ ID NO: 8091 - protein, 599 aa, Mouse mammary tumor virus
GRDIMKDIKVRLMTDSPDDSQDLMIGAIESNLFADQISWKSDQPVWLNQWPLKQEKLQALQQLVTEQLQLGHLEESNSPWNTPVFVIKKKSGKWRLLQDLRAVNATMHDMGALQPGLPSPVAVPKGWEIIIIDLQDCFFNIKLHPEDCKRFAFSVPSPNFKRPYQRFQWKVLPQGMKNSPTLCQKFVDKAILTVRDKYQDSYIVHYMDDILLAHPSRSIVDEILTSMIQALNKHGLVVSTEKIQKYDNLKYLGTHIQGDSVSYQKLQIRTDKLRTLNDFQKLLGNINWIRPFLKLTTGELKPLFEILNGDSNPISTRKLTPEACKALQLMNERLSTARVKRLDLSQPWSLCILKTEYTPTACLWQDGVVEWIHLPHISPKVITPYDIFCTQLIIKGRHRSKELFSKDPDYIVVPYTKVQFDLLLQEKEDWPISLLGFLGEVHFHLPKDPLLTFTLQTAIIFPHMTSTTPLEKGIVIFTDGSANGRSVTYIQGREPIIKENTQNTAQQAEIVAVITAFEEVSQPFNLYTDSKYVTGLFPEIETATLSPRTKIYTELKHLQRLIHKRQEKFYIGHIRGHTGLPGPLAQGNAYADSLTRILT

SEQ ID NO: 8092 - protein, 599 aa, Mouse mammary tumor virus; identical to SEQ ID NO: 8091

SEQ ID NO: 8093 - protein, 599 aa, synthetic construct
GRDIMKDIKVRLMTDSPDDSQDLMIGAIESNLFADQISWKSDQPVWLNQWPLKQEKLQALQQLVTEQLQLGHLEESNSPWNTPVFVIKKKSGKWRLLQDLRAVNATMHDMGALQPGLPSPVAVPKGWEIIIIDLQDCFFNIKLHPEDCKRFAFSVPSPNFKRPYQRFQWKVLPQGMKNSPTLCQKFVDKAILTVRDKYQDSYIVHYMDDILLAHPSRSIVDEILTSMIQALNKHGLVVSTEKIQKYDNLKYLGTHIQGDSVSYQKLQIRTDKLRTLNDFQKLLGNINWIRPFLKLTTGELKPLFEILNPDSNPISTRKLTPEACKALQLMNERLSTARVKRLDLSQPWSLCILKTEYTPTACLWQDGVVEWIHLPHISPKVITPYDIFCTQLIIKGRHRSKELFSKDPDYIVVPYTKVQFDLLLQEKEDWPISLLGFLGEVHFHLPKDPLLTFTLQTAIIFPHMTSTTPLEKGIVIFTDGSANGRSVTYIQGREPIIKENTQNTAQQAEIVAVITAFEEVSQPFNLYTDSKYVTGLFPEIETATLSPRTKIYTELKHLQRLIHKRQEKFYIGHIRGHTGLPGPLAQGNAYADSLTRILT

SEQ ID NO: 8094 - protein, 599 aa, synthetic construct; identical to SEQ ID NO: 8093

SEQ ID NO: 8095 - protein, 599 aa, synthetic construct
GRDIMKDIKVRLMTDSPDDSQDLMIGAIESNLFADQISWKSDQPVWLNQWPLKQEKLQALQQLVTEQLQLGHLEESNSPWNTPVFVIKKKSGKWRLLQDLRAVNATMHDMGALQPGLPSPVAPPKGWEIIIIDLQDCFFNIKLHPEDCKRFAFSVPSPNFKRPYQRFQWKVLPQGMKNSPTLCQKFVDKAILTVRDKYQDSYIVHYMDDILLAHPSRSIVDEILTSMIQALNKHGLVVSTEKIQKYDNLKYLGTHIQGDSVSYQKLQIRTDKLRTLNDFQKLLGNINWIRPFLKLTTGELKPLFEILNPDSNPISTRKLTPEACKALQLMNERLSTARVKRLDLSQPWSLCILKTEYTPTACLWQDGVVEWIHLPHISPKVITPYDIFCTQLIIKGRHRSKELFSKDPDYIVVPYTKVQFDLLLQEKEDWPISLLGFLGEVHFHLPKDPLLTFTLQTAIIFPHMTSTTPLEKGIVIFTDGSANGRSVTYIQGREPIIKENTQNTAQQAEIVAVITAFEEVSQPFNLYTDSKYVTGLFPEIETATLSPRTKIYTELKHLQRLIHKRQEKFYIGHIRGHTGLPGPLAQGNAYADSLTRILT

SEQ ID NO: 8096 - protein, 599 aa, synthetic construct; identical to SEQ ID NO: 8095

SEQ ID NO: 8097 - protein, 585 aa, Mason-Pfizer monkey virus
LTAAIDILAPQQCAEPITWKSDEPVWVDQWPLTNDKLAAAQQLVQEQLEAGHITESSSPWNTPIFVIKKKSGKWRLLQDLRAVNATMVLMGALQPGLPSPVAIPQGYLKIIIDLKDCFFSIPLHPSDQKRFAFSLPSTNFKEPMQRFQWKVLPQGMANSPTLCQKYVATAIHKVRHAWKQMYIIHYMDDILIAGKDGQQVLQCFDQLKQELTAAGLHIAPEKVQLQDPYTYLGFELNGPKITNQKAVIRKDKLQTLNDFQKLLGDINWLRPYLKLTTGDLKPLFDTLKGDSDPNSHRSLSKEALASLEKVETAIAEQFVTHINYSLPLIFLIFNTALTPTGLFWQDNPIMWIHLPASPKKVLLPYYDAIADLIILGRDHSKKYFGIEPSTIIQPYSKSQIDWLMQNTEMWPIACASFVGILDNHYPPNKLIQFCKLHTFVFPQIISKTPLNNALLVFTDGSSTGMAAYTLTDTTIKFQTNLNSAQLVELQALIAVLSAFPNQPLNIYTDSAYLAHSIPLLETVAQIKHISETAKLFLQCQQLIYNRSIPFYIGHVRAHSGLPGPIAQGNQRADLATKIVASNINT

SEQ ID NO: 8098 - protein, 585 aa, synthetic construct
LTAAIDILAPQQCAEPITWKSDEPVWVDQWPLTNDKLAAAQQLVQEQLEAGHITESSSPWNTPIFVIKKKSGKWRLLQDLRAVNATMVLMGALQPGLPSPVAPPQGYLKIIIDLKDCFFSIPLHPSDQKRFAFSLPSTNFKEPMQRFQWKVLPQGMANSPTLCQKYVATAIHKVRHAWKQMYIIHYMDDILIAGKDGQQVLQCFDQLKQELTAAGLHIAPEKVQLQDPYTYLGFELNGPKITNQKAVIRKDKLQTLNDFQKLLGDINWLRPYLKLTTGDLKPLFDTLKPDSDPNSHRSLSKEALASLEKVETAIAEQFVTHINYSLPLIFLIFNTALTPTGLFWQDNPIMWIHLPASPKKVLLPYYDAIADLIILGRDHSKKYFGIEPSTIIQPYSKSQIDWLMQNTEMWPIACASFVGILDNHYPPNKLIQFCKLHTFVFPQIISKTPLNNALLVFTDGSSTGMAAYTLTDTTIKFQTNLNSAQLVELQALIAVLSAFPNQPLNIYTDSAYLAHSIPLLETVAQIKHISETAKLFLQCQQLIYNRSIPFYIGHVRAHSGLPGPIAQGNQRADLATKIVASNINT

SEQ ID NO: 8099 - protein, 665 aa, unidentified
TLQLDDEYRLYSPLVKPDQNIQFWLEQFPQAWAETAGMGLAKQVPPQVIQLKASATPVSVRQYPLSKEAQEGIRPHVQRLIQQGILVPVQSPWNTPLLPVRKPGTNDYRPVQDLREVNKRVQDIHPTVPNPYNLLCALPPQRSWYTVLDLKDAFFCLRLHPTSQPLFAFEWRDPGTGRTGQLTWTRLPQGFKNSPTIFDEALHRDLANFRIQHPQVTLLQYVDDLLLAGATKQDCLEGTKALLLELSDLGYRASAKKAQICRREVTYLGYSLRDGQRWLTEARKKTVVQIPAPTTAKQVREFLGTAGFCRLWIPGFATLAAPLYPLTKEKGEFSWAPEHQKAFDAIKKALLSAPALALPDVTKPFTLYVDERKGVARGVLTQTLGPWRRPVAYLSKKLDPVASGWPVCLKAIAAVAILVKDADKLTLGQNITVIAPHALENIVRQPPDRWMTNARMTHYQSLLLTERVTFAPPAALNPATLLPEETDEPVTHDCHQLLIEETGVRKDLTDIPLTGEVLTWFTDGSSYVVEGKRMAGAAVVDGTRTIWASSLPEGTSAQKAELMALTQALRLAEGKSINIYTDSRYAFATAHVHGAIYKQRGLLTSAGREIKNKEEILSLLEALHLPKRLAIIHCPGHQKAKDPISRGNQMADRVAKQAAQGVNLL

SEQ ID NO: 8100 - protein, 665 aa, unidentified; identical to SEQ ID NO: 8099

SEQ ID NO: 8101 - protein, 665 aa, synthetic construct
TLQLDDEYRLYSPLVKPDQNIQFWLEQFPQAWAETAGMGLAKQVPPQVIQLKASATPVSVRQYPLSKEAQEGIRPHVQRLIQQGILVPVQSPWNTPLLPVRKPGTNDYRPVQDLREVNKRVQDIHPTVPNPYNLLCALPPQRSWYTVLDLKDAFFCLRLHPTSQPLFAFEWRDPGTGRTGQLTWTRLPQGFKNSPTIFNEALHRDLANFRIQHPQVTLLQYVDDLLLAGATKQDCLEGTKALLLELSDLGYRASAKKAQICRREVTYLGYSLRDGQRWLTEARKKTVVQIPAPTTAKQVREFLGTAGFCRLWIPGFATLAAPLYPLTKPKGEFSWAPEHQKAFDAIKKALLSAPALALPDVTKPFTLYVDERKGVARGVLTQTLGPWRRPVAYLSKKLDPVASGWPVCLKAIAAVAILVKDADKLTLGQNITVIAPHALENIVRQPPDRWMTNARMTHYQSLLLTERVTFAPPAALNPATLLPEETDEPVTHDCHQLLIEETGVRKDLTDIPLTGEVLTWFTDGSSYVVEGKRMAGAAVVDGTRTIWASSLPEGTSAQKAELMALTQALRLAEGKSINIYTDSRYAFATAHVHGAIYKQRGWLTSAGREIKNKEEILSLLEALHLPKRLAIIHCPGHQKAKDPISRGNQMADRVAKQAAQGVNLL

SEQ ID NO: 8102 - protein, 665 aa, synthetic construct; identical to SEQ ID NO: 8101

SEQ ID NO: 8103 - protein, 663 aa, synthetic construct
LDDEYRLYSPLVKPDQNIQFWLEQFPQAWAETAGMGLAKQVPPQVIQLKASATPVSVRQYPLSKEAQEGIRPHVQRLIQQGILVPVQSPWNTPLLPVRKPGTNDYRPVQDLREVNKRVQDIHPTVPNPYNLLCALPPQRSWYTVLDLKDAFFCLRLHPTSQPLFAFEWRDPGTGRTGQLTWTRLPQGFKNSPTIFNEALHRDLANFRIQHPQVTLLQYVDDLLLAGATKQDCLEGTKALLLELSDLGYRASAKKAQICRREVTYLGYSLRDGQRWLTEARKKTVVQIPAPTTAKQVREFLGKAGFCRLFIPGFATLAAPLYPLTKPKGEFSWAPEHQKAFDAIKKALLSAPALALPDVTKPFTLYVDERKGVARGVLTQTLGPWRRPVAYLSKKLDPVASGWPVCLKAIAAVAILVKDADKLTLGQNITVIAPHALENIVRQPPDRWMTNARMTHYQSLLLTERVTFAPPAALNPATLLPEETDEPVTHDCHQLLIEETGVRKDLTDIPLTGEVLTWFTDGSSYVVEGKRMAGAAVVDGTRTIWASSLPEGTSAQKAELMALTQALRLAEGKSINIYTDSRYAFATAHVHGAIYKQRGWLTSAGREIKNKEEILSLLEALHLPKRLAIIHCPGHQKAKDPISRGNQMADRVAKQAAQGVNLLP

SEQ ID NO: 8104 - protein, 663 aa, synthetic construct; identical to SEQ ID NO: 8103

SEQ ID NO: 8105 - protein, 751 aa, Macaque simian foamy virus
MDPLQLLQPLEAEIKGTKLKAHWNSGATITCVPEAFLEDERPIQTMLIKTIHGEKQQDVYYLTFKVQGRKVEAEVLASPYDYILLNPSDVPWLMKKPLQLTVLVPLHEYQERLLQQTALPKEQKELLQKLFLKYDALWQHWENQVGHRRIKPHNIATGTLAPRPQKQYPINPKAKPSIQIVIDDLLKQGVLIQQNSTMNTPVYPVPKPDGKWRMVLDYREVNKTIPLIAAQNQHSAGILSSIYRGKYKTTLDLTNGFWAHPITPESYWLTAFTWQGKQYCWTRLPQGFLNSPALFTADVVDLLKEIPNVQAYVDDIYISHDDPQEHLEQLEKIFSILLNAGYVVSLKKSEIAQREVEFLGFNITKEGRGLTDTFKQKLLNITPPKDLKQLQSILGLLNFARNFIPNYSELVKPLYTIVANANGKFISWTEDNSNQLQHIISVLNQADNLEERNPETRLIIKVNSSPSAGYIRYYNEGSKRPIMYVNYIFSKAEAKFTQTEKLLTTMHKGLIKAMDLAMGQEILVYSPIVSMTKIQRTPLPERKALPVRWITWMTYLEDPRIQFHYDKSLPELQQIPNVTEDVIAKTKHPSEFAMVFYTDGSAIKHPDVNKSHSAGMGIAQVQFIPEYKIVHQWSIPLGDHTAQLAEIAAVEFACKKALKISGPVLIVTDSFYVAESANKELPYWKSNGFLNNKKKPLRHVSKWKSIAECLQLKPDIIIMHEKGHQQPMTTLHTEGNNLADKLATQGSYVVH

SEQ ID NO: 8106 - protein, 751 aa, synthetic construct
MDPLQLLQPLEAEIKGTKLKAHWNSGATITCVPEAFLEDERPIQTMLIKTIHGEKQQDVYYLTFKVQGRKVEAEVLASPYDYILLNPSDVPWLMKKPLQLTVLVPLHEYQERLLQQTALPKEQKELLQKLFLKYDALWQHWENQVGHRRIKPHNIATGTLAPRPQKQYPINPKAKPSIQIVIDDLLKQGVLIQQNSTMNTPVYPVPKPDGKWRMVLDYREVNKTIPLIAAQNQHSAGILSSIYRGKYKTTLDLTNGFWAHPITPESYWLTAFTWQGKQYCWTRLPQGFLNSPALFNADVVDLLKEIPNVQAYVDDIYISHDDPQEHLEQLEKIFSILLNAGYVVSLKKSEIAQREVEFLGFNITKEGRGLTDTFKQKLLNITPPKDLKQLQSILGLLNFARNFIPNYSELVKPLYTIVAPANGKFISWTEDNSNQLQHIISVLNQADNLEERNPETRLIIKVNSSPSAGYIRYYNEGSKRPIMYVNYIFSKAEAKFTQTEKLLTTMHKGLIKAMDLAMGQEILVYSPIVSMTKIQRTPLPERKALPVRWITWMTYLEDPRIQFHYDKSLPELQQIPNVTEDVIAKTKHPSEFAMVFYTDGSAIKHPDVNKSHSAGMGIAQVQFIPEYKIVHQWSIPLGDHTAQLAEIAAVEFACKKALKISGPVLIVTDSFYVAESANKELPYWKSNGFLNNKKKPLRHVSKWKSIAECLQLKPDIIIMHEKGHQQPMTTLHTEGNNLADKLATQGSYVVH

SEQ ID NO: 8107 - protein, 751 aa, synthetic construct
MDPLQLLQPLEAEIKGTKLKAHWNSGATITCVPEAFLEDERPIQTMLIKTIHGEKQQDVYYLTFKVQGRKVEAEVLASPYDYILLNPSDVPWLMKKPLQLTVLVPLHEYQERLLQQTALPKEQKELLQKLFLKYDALWQHWENQVGHRRIKPHNIATGTLAPRPQKQYPINPKAKPSIQIVIDDLLKQGVLIQQNSTMNTPVYPVPKPDGKWRMVLDYREVNKTIPLIAAQNQHSAGILSSIYRGKYKTTLDLTNGFWAHPITPESYWLTAFTWQGKQYCWTRLPQGFLNSPALFNADVVDLLKEIPNVQAYVDDIYISHDDPQEHLEQLEKIFSILLNAGYVVSLKKSEIAQREVEFLGFNITKEGRGLTDTFKQKLLNITPPKDLKQLQSILGKLNFARNFIPNYSELVKPLYTIVAPANGKFISWTEDNSNQLQHIISVLNQADNLEERNPETRLIIKVNSSPSAGYIRYYNEGSKRPIMYVNYIFSKAEAKFTQTEKLLTTMHKGLIKAMDLAMGQEILVYSPIVSMTKIQRTPLPERKALPVRWITWMTYLEDPRIQFHYDKSLPELQQIPNVTEDVIAKTKHPSEFAMVFYTDGSAIKHPDVNKSHSAGMGIAQVQFIPEYKIVHQWSIPLGDHTAQLAEIAAVEFACKKALKISGPVLIVTDSFYVAESANKELPYWKSNGFLNNKKKPLRHVSKWKSIAECLQLKPDIIIMHEKGHQQPMTTLHTEGNNLADKLATQGSYVVH

SEQ ID NO: 8108 - protein, 662 aa, Macaque simian foamy virus
VPWLMKKPLQLTVLVPLHEYQERLLQQTALPKEQKELLQKLFLKYDALWQHWENQVGHRRIKPHNIATGTLAPRPQKQYPINPKAKPSIQIVIDDLLKQGVLIQQNSTMNTPVYPVPKPDGKWRMVLDYREVNKTIPLIAAQNQHSAGILSSIYRGKYKTTLDLTNGFWAHPITPESYWLTAFTWQGKQYCWTRLPQGFLNSPALFTADVVDLLKEIPNVQAYVDDIYISHDDPQEHLEQLEKIFSILLNAGYVVSLKKSEIAQREVEFLGFNITKEGRGLTDTFKQKLLNITPPKDLKQLQSILGLLNFARNFIPNYSELVKPLYTIVANANGKFISWTEDNSNQLQHIISVLNQADNLEERNPETRLIIKVNSSPSAGYIRYYNEGSKRPIMYVNYIFSKAEAKFTQTEKLLTTMHKGLIKAMDLAMGQEILVYSPIVSMTKIQRTPLPERKALPVRWITWMTYLEDPRIQFHYDKSLPELQQIPNVTEDVIAKTKHPSEFAMVFYTDGSAIKHPDVNKSHSAGMGIAQVQFIPEYKIVHQWSIPLGDHTAQLAEIAAVEFACKKALKISGPVLIVTDSFYVAESANKELPYWKSNGFLNNKKKPLRHVSKWKSIAECLQLKPDIIIMHEKGHQQPMTTLHTEGNNLADKLATQGSYVVH

SEQ ID NO: 8109 - protein, 662 aa, synthetic construct
VPWLMKKPLQLTVLVPLHEYQERLLQQTALPKEQKELLQKLFLKYDALWQHWENQVGHRRIKPHNIATGTLAPRPQKQYPINPKAKPSIQIVIDDLLKQGVLIQQNSTMNTPVYPVPKPDGKWRMVLDYREVNKTIPLIAAQNQHSAGILSSIYRGKYKTTLDLTNGFWAHPITPESYWLTAFTWQGKQYCWTRLPQGFLNSPALFNADVVDLLKEIPNVQAYVDDIYISHDDPQEHLEQLEKIFSILLNAGYVVSLKKSEIAQREVEFLGFNITKEGRGLTDTFKQKLLNITPPKDLKQLQSILGLLNFARNFIPNYSELVKPLYTIVAPANGKFISWTEDNSNQLQHIISVLNQADNLEERNPETRLIIKVNSSPSAGYIRYYNEGSKRPIMYVNYIFSKAEAKFTQTEKLLTTMHKGLIKAMDLAMGQEILVYSPIVSMTKIQRTPLPERKALPVRWITWMTYLEDPRIQFHYDKSLPELQQIPNVTEDVIAKTKHPSEFAMVFYTDGSAIKHPDVNKSHSAGMGIAQVQFIPEYKIVHQWSIPLGDHTAQLAEIAAVEFACKKALKISGPVLIVTDSFYVAESANKELPYWKSNGFLNNKKKPLRHVSKWKSIAECLQLKPDIIIMHEKGHQQPMTTLHTEGNNLADKLATQGSYVVH

SEQ ID NO: 8110 - protein, 662 aa, synthetic construct
VPWLMKKPLQLTVLVPLHEYQERLLQQTALPKEQKELLQKLFLKYDALWQHWENQVGHRRIKPHNIATGTLAPRPQKQYPINPKAKPSIQIVIDDLLKQGVLIQQNSTMNTPVYPVPKPDGKWRMVLDYREVNKTIPLIAAQNQHSAGILSSIYRGKYKTTLDLTNGFWAHPITPESYWLTAFTWQGKQYCWTRLPQGFLNSPALFNADVVDLLKEIPNVQAYVDDIYISHDDPQEHLEQLEKIFSILLNAGYVVSLKKSEIAQREVEFLGFNITKEGRGLTDTFKQKLLNITPPKDLKQLQSILGKLNFARNFIPNYSELVKPLYTIVAPANGKFISWTEDNSNQLQHIISVLNQADNLEERNPETRLIIKVNSSPSAGYIRYYNEGSKRPIMYVNYIFSKAEAKFTQTEKLLTTMHKGLIKAMDLAMGQEILVYSPIVSMTKIQRTPLPERKALPVRWITWMTYLEDPRIQFHYDKSLPELQQIPNVTEDVIAKTKHPSEFAMVFYTDGSAIKHPDVNKSHSAGMGIAQVQFIPEYKIVHQWSIPLGDHTAQLAEIAAVEFACKKALKISGPVLIVTDSFYVAESANKELPYWKSNGFLNNKKKPLRHVSKWKSIAECLQLKPDIIIMHEKGHQQPMTTLHTEGNNLADKLATQGSYVVH

SEQ ID NO: 8111 - protein, 751 aa, unidentified
MDPLQLLQPLEAEIKGTKLKAHWNSGATITCVPQAFLEEEVPIKNIWIKTIHGEKEQPVYYLTFKIQGRKVEAEVISSPYDYILVSPSDIPWLMKKPLQLTTLVPLQEYEERLLKQTMLTGSYKEKLQSLFLKYDALWQHWENQVGHRRIKPHHIATGTVNPRPQKQYPINPKAKASIQTVINDLLKQGVLIQQNSIMNTPVYPVPKPDGKWRMVLDYREVNKTIPLIAAQNQHSAGILSSIFRGKYKTTLDLSNGFWAHSITPESYWLTAFTWLGQQYCWTRLPQGFLNSPALFTADVVDLLKEVPNVQVYVDDIYISHDDPREHLEQLEKVFSLLLNAGYVVSLKKSEIAQHEVEFLGFNITKEGRGLTETFKQKLLNITPPRDLKQLQSILGLLNFARNFIPNFSELVKPLYNIIATANGKYITWTTDNSQQLQNIISMLNSAENLEERNPEVRLIMKVNTSPSAGYIRFYNEFAKRPIMYLNYVYTKAEVKFTNTEKLLTTIHKGLIKALDLGMGQEILVYSPIVSMTKIQKTPLPERKALPIRWITWMSYLEDPRIQFHYDKTLPELQQVPTVTDDIIAKIKHPSEFSMVFYTDGSAIKHPNVNKSHNAGMGIAQVQFKPEFTVINTWSIPLGDHTAQLAEVAAVEFACKKALKIDGPVLIVTDSFYVAESVNKELPYWQSNGFFNNKKKPLKHVSKWKSIADCIQLKPDIIIIHEKGHQPTASTFHTEGNNLADKLATQGSYVVN

SEQ ID NO: 8112 - protein, 751 aa, synthetic construct
MDPLQLLQPLEAEIKGTKLKAHWNSGATITCVPQAFLEEEVPIKNIWIKTIHGEKEQPVYYLTFKIQGRKVEAEVISSPYDYILVSPSDIPWLMKKPLQLTTLVPLQEYEERLLKQTMLTGSYKEKLQSLFLKYDALWQHWENQVGHRRIKPHHIATGTVNPRPQKQYPINPKAKASIQTVINDLLKQGVLIQQNSIMNTPVYPVPKPDGKWRMVLDYREVNKTIPLIAAQNQHSAGILSSIFRGKYKTTLDLSNGFWAHSITPESYWLTAFTWLGQQYCWTRLPQGFLNSPALFNADVVDLLKEVPNVQVYVDDIYISHDDPREHLEQLEKVFSLLLNAGYVVSLKKSEIAQHEVEFLGFNITKEGRGLTETFKQKLLNITPPRDLKQLQSILGLLNFARNFIPNFSELVKPLYNIIATAPGKYITWTTDNSQQLQNIISMLNSAENLEERNPEVRLIMKVNTSPSAGYIRFYNEFAKRPIMYLNYVYTKAEVKFTNTEKLLTTIHKGLIKALDLGMGQEILVYSPIVSMTKIQKTPLPERKALPIRWITWMSYLEDPRIQFHYDKTLPELQQVPTVTDDIIAKIKHPSEFSMVFYTDGSAIKHPNVNKSHNAGMGIAQVQFKPEFTVINTWSIPLGDHTAQLAEVAAVEFACKKALKIDGPVLIVTDSFYVAESVNKELPYWQSNGFFNNKKKPLKHVSKWKSIADCIQLKPDIIIIHEKGHQPTASTFHTEGNNLADKLATQGSYVVN

SEQ ID NO: 8113 - protein, 751 aa, synthetic construct
MDPLQLLQPLEAEIKGTKLKAHWNSGATITCVPQAFLEEEVPIKNIWIKTIHGEKEQPVYYLTFKIQGRKVEAEVISSPYDYILVSPSDIPWLMKKPLQLTTLVPLQEYEERLLKQTMLTGSYKEKLQSLFLKYDALWQHWENQVGHRRIKPHHIATGTVNPRPQKQYPINPKAKASIQTVINDLLKQGVLIQQNSIMNTPVYPVPKPDGKWRMVLDYREVNKTIPLIAAQNQHSAGILSSIFRGKYKTTLDLSNGFWAHSITPESYWLTAFTWLGQQYCWTRLPQGFLNSPALFNADVVDLLKEVPNVQVYVDDIYISHDDPREHLEQLEKVFSLLLNAGYVVSLKKSEIAQHEVEFLGFNITKEGRGLTETFKQKLLNITPPRDLKQLQSILGKLNFARNFIPNFSELVKPLYNIIATAPGKYITWTTDNSQQLQNIISMLNSAENLEERNPEVRLIMKVNTSPSAGYIRFYNEFAKRPIMYLNYVYTKAEVKFTNTEKLLTTIHKGLIKALDLGMGQEILVYSPIVSMTKIQKTPLPERKALPIRWITWMSYLEDPRIQFHYDKTLPELQQVPTVTDDIIAKIKHPSEFSMVFYTDGSAIKHPNVNKSHNAGMGIAQVQFKPEFTVINTWSIPLGDHTAQLAEVAAVEFACKKALKIDGPVLIVTDSFYVAESVNKELPYWQSNGFFNNKKKPLKHVSKWKSIADCIQLKPDIIIIHEKGHQPTASTFHTEGNNLADKLATQGSYVVN

SEQ ID NO: 8114 - protein, 662 aa, unidentified
IPWLMKKPLQLTTLVPLQEYEERLLKQTMLTGSYKEKLQSLFLKYDALWQHWENQVGHRRIKPHHIATGTVNPRPQKQYPINPKAKASIQTVINDLLKQGVLIQQNSIMNTPVYPVPKPDGKWRMVLDYREVNKTIPLIAAQNQHSAGILSSIFRGKYKTTLDLSNGFWAHSITPESYWLTAFTWLGQQYCWTRLPQGFLNSPALFTADVVDLLKEVPNVQVYVDDIYISHDDPREHLEQLEKVFSLLLNAGYVVSLKKSEIAQHEVEFLGFNITKEGRGLTETFKQKLLNITPPRDLKQLQSILGLLNFARNFIPNFSELVKPLYNIIATANGKYITWTTDNSQQLQNIISMLNSAENLEERNPEVRLIMKVNTSPSAGYIRFYNEFAKRPIMYLNYVYTKAEVKFTNTEKLLTTIHKGLIKALDLGMGQEILVYSPIVSMTKIQKTPLPERKALPIRWITWMSYLEDPRIQFHYDKTLPELQQVPTVTDDIIAKIKHPSEFSMVFYTDGSAIKHPNVNKSHNAGMGIAQVQFKPEFTVINTWSIPLGDHTAQLAEVAAVEFACKKALKIDGPVLIVTDSFYVAESVNKELPYWQSNGFFNNKKKPLKHVSKWKSIADCIQLKPDIIIIHEKGHQPTASTFHTEGNNLADKLATQGSYVVN

SEQ ID NO: 8115 - protein, 662 aa, synthetic construct
IPWLMKKPLQLTTLVPLQEYEERLLKQTMLTGSYKEKLQSLFLKYDALWQHWENQVGHRRIKPHHIATGTVNPRPQKQYPINPKAKASIQTVINDLLKQGVLIQQNSIMNTPVYPVPKPDGKWRMVLDYREVNKTIPLIAAQNQHSAGILSSIFRGKYKTTLDLSNGFWAHSITPESYWLTAFTWLGQQYCWTRLPQGFLNSPALFNADVVDLLKEVPNVQVYVDDIYISHDDPREHLEQLEKVFSLLLNAGYVVSLKKSEIAQHEVEFLGFNITKEGRGLTETFKQKLLNITPPRDLKQLQSILGLLNFARNFIPNFSELVKPLYNIIATAPGKYITWTTDNSQQLQNIISMLNSAENLEERNPEVRLIMKVNTSPSAGYIRFYNEFAKRPIMYLNYVYTKAEVKFTNTEKLLTTIHKGLIKALDLGMGQEILVYSPIVSMTKIQKTPLPERKALPIRWITWMSYLEDPRIQFHYDKTLPELQQVPTVTDDIIAKIKHPSEFSMVFYTDGSAIKHPNVNKSHNAGMGIAQVQFKPEFTVINTWSIPLGDHTAQLAEVAAVEFACKKALKIDGPVLIVTDSFYVAESVNKELPYWQSNGFFNNKKKPLKHVSKWKSIADCIQLKPDIIIIHEKGHQPTASTFHTEGNNLADKLATQGSYVVN

SEQ ID NO: 8116 - protein, 662 aa, synthetic construct
IPWLMKKPLQLTTLVPLQEYEERLLKQTMLTGSYKEKLQSLFLKYDALWQHWENQVGHRRIKPHHIATGTVNPRPQKQYPINPKAKASIQTVINDLLKQGVLIQQNSIMNTPVYPVPKPDGKWRMVLDYREVNKTIPLIAAQNQHSAGILSSIFRGKYKTTLDLSNGFWAHSITPESYWLTAFTWLGQQYCWTRLPQGFLNSPALFNADVVDLLKEVPNVQVYVDDIYISHDDPREHLEQLEKVFSLLLNAGYVVSLKKSEIAQHEVEFLGFNITKEGRGLTETFKQKLLNITPPRDLKQLQSILGKLNFARNFIPNFSELVKPLYNIIATAPGKYITWTTDNSQQLQNIISMLNSAENLEERNPEVRLIMKVNTSPSAGYIRFYNEFAKRPIMYLNYVYTKAEVKFTNTEKLLTTIHKGLIKALDLGMGQEILVYSPIVSMTKIQKTPLPERKALPIRWITWMSYLEDPRIQFHYDKTLPELQQVPTVTDDIIAKIKHPSEFSMVFYTDGSAIKHPNVNKSHNAGMGIAQVQFKPEFTVINTWSIPLGDHTAQLAEVAAVEFACKKALKIDGPVLIVTDSFYVAESVNKELPYWQSNGFFNNKKKPLKHVSKWKSIADCIQLKPDIIIIHEKGHQPTASTFHTEGNNLADKLATQGSYVVN

SEQ ID NO: 8117 - protein, 751 aa, Simian foamy virus
MNPLQLLQPLPAEVKGTKLLAHWNSGATITCIPESFLEDEQPIKQTLIKTIHGEKQQNVYYLTFKVKGRKVEAEVIASPYEYILLSPTDVPWLTQQPLQLTILVPLQEYQDRILNKTALPEEQKQQLKALFTKYDNLWQHWENQVGHRKIRPHNIATGDYPPRPQKQYPINPKAKPSIQIVIDDLLKQGVLTPQNSTMNTPVYPVPKPDGRWRMVLDYREVNKTIPLTAAQNQHSAGILATIVRQKYKTTLDLANGFWAHPITPDSYWLTAFTWQGKQYCWTRLPQGFLNSPALFTADAVDLLKEVPNVQVYVDDIYLSHDNPHEHIQQLEKVFQILLQAGYVVSLKKSEIGQRTVEFLGFNITKEGRGLTDTFKTKLLNVTPPKDLKQLQSILGLLNFARNFIPNFAELVQTLYNLIASSKGKYIEWTEDNTKQLNKVIEALNTASNLEERLPDQRLVIKVNTSPSAGYVRYYNESGKKPIMYLNYVFSKAELKFSMLEKLLTTMHKALIKAMDLAMGQEILVYSPIVSMTKIQKTPLPERKALPIRWITWMTYLEDPRIQFHYDKTLPELKHIPDVYTSSIPPLKHPSQYEGVFCTDGSAIKSPDPTKSNNAGMGIVHAIYNPEYKILNQWSIPLGHHTAQMAEIAAVEFACKKALKVPGPVLVITDSFYVAESANKELPYWKSNGFVNNKKEPLKHISKWKSIAECLSIKPDITIQHEKGHQPINTSIHTEGNALADKLATQGSYVVN

SEQ ID NO: 8118 - protein, 751 aa, synthetic construct
MNPLQLLQPLPAEVKGTKLLAHWNSGATITCIPESFLEDEQPIKQTLIKTIHGEKQQNVYYLTFKVKGRKVEAEVIASPYEYILLSPTDVPWLTQQPLQLTILVPLQEYQDRILNKTALPEEQKQQLKALFTKYDNLWQHWENQVGHRKIRPHNIATGDYPPRPQKQYPINPKAKPSIQIVIDDLLKQGVLTPQNSTMNTPVYPVPKPDGRWRMVLDYREVNKTIPLTAAQNQHSAGILATIVRQKYKTTLDLANGFWAHPITPDSYWLTAFTWQGKQYCWTRLPQGFLNSPALFNADAVDLLKEVPNVQVYVDDIYLSHDNPHEHIQQLEKVFQILLQAGYVVSLKKSEIGQRTVEFLGFNITKEGRGLTDTFKTKLLNVTPPKDLKQLQSILGLLNFARNFIPNFAELVQTLYNLIASSPGKYIEWTEDNTKQLNKVIEALNTASNLEERLPDQRLVIKVNTSPSAGYVRYYNESGKKPIMYLNYVFSKAELKFSMLEKLLTTMHKALIKAMDLAMGQEILVYSPIVSMTKIQKTPLPERKALPIRWITWMTYLEDPRIQFHYDKTLPELKHIPDVYTSSIPPLKHPSQYEGVFCTDGSAIKSPDPTKSNNAGMGIVHAIYNPEYKILNQWSIPLGHHTAQMAEIAAVEFACKKALKVPGPVLVITDSFYVAESANKELPYWKSNGFVNNKKEPLKHISKWKSIAECLSIKPDITIQHEKGHQPINTSIHTEGNALADKLATQGSYVVN

SEQ ID NO: 8119 - protein, 751 aa, synthetic construct
MNPLQLLQPLPAEVKGTKLLAHWNSGATITCIPESFLEDEQPIKQTLIKTIHGEKQQNVYYLTFKVKGRKVEAEVIASPYEYILLSPTDVPWLTQQPLQLTILVPLQEYQDRILNKTALPEEQKQQLKALFTKYDNLWQHWENQVGHRKIRPHNIATGDYPPRPQKQYPINPKAKPSIQIVIDDLLKQGVLTPQNSTMNTPVYPVPKPDGRWRMVLDYREVNKTIPLTAAQNQHSAGILATIVRQKYKTTLDLANGFWAHPITPDSYWLTAFTWQGKQYCWTRLPQGFLNSPALFNADAVDLLKEVPNVQVYVDDIYLSHDNPHEHIQQLEKVFQILLQAGYVVSLKKSEIGQRTVEFLGFNITKEGRGLTDTFKTKLLNVTPPKDLKQLQSILGKLNFARNFIPNFAELVQTLYNLIASSPGKYIEWTEDNTKQLNKVIEALNTASNLEERLPDQRLVIKVNTSPSAGYVRYYNESGKKPIMYLNYVFSKAELKFSMLEKLLTTMHKALIKAMDLAMGQEILVYSPIVSMTKIQKTPLPERKALPIRWITWMTYLEDPRIQFHYDKTLPELKHIPDVYTSSIPPLKHPSQYEGVFCTDGSAIKSPDPTKSNNAGMGIVHAIYNPEYKILNQWSIPLGHHTAQMAEIAAVEFACKKALKVPGPVLVITDSFYVAESANKELPYWKSNGFVNNKKEPLKHISKWKSIAECLSIKPDITIQHEKGHQPINTSIHTEGNALADKLATQGSYVVN

SEQ ID NO: 8120 - protein, 662 aa, Simian foamy virus
VPWLTQQPLQLTILVPLQEYQDRILNKTALPEEQKQQLKALFTKYDNLWQHWENQVGHRKIRPHNIATGDYPPRPQKQYPINPKAKPSIQIVIDDLLKQGVLTPQNSTMNTPVYPVPKPDGRWRMVLDYREVNKTIPLTAAQNQHSAGILATIVRQKYKTTLDLANGFWAHPITPDSYWLTAFTWQGKQYCWTRLPQGFLNSPALFTADAVDLLKEVPNVQVYVDDIYLSHDNPHEHIQQLEKVFQILLQAGYVVSLKKSEIGQRTVEFLGFNITKEGRGLTDTFKTKLLNVTPPKDLKQLQSILGLLNFARNFIPNFAELVQTLYNLIASSKGKYIEWTEDNTKQLNKVIEALNTASNLEERLPDQRLVIKVNTSPSAGYVRYYNESGKKPIMYLNYVFSKAELKFSMLEKLLTTMHKALIKAMDLAMGQEILVYSPIVSMTKIQKTPLPERKALPIRWITWMTYLEDPRIQFHYDKTLPELKHIPDVYTSSIPPLKHPSQYEGVFCTDGSAIKSPDPTKSNNAGMGIVHAIYNPEYKILNQWSIPLGHHTAQMAEIAAVEFACKKALKVPGPVLVITDSFYVAESANKELPYWKSNGFVNNKKEPLKHISKWKSIAECLSIKPDITIQHEKGHQPINTSIHTEGNALADKLATQGSYVVN

SEQ ID NO: 8121 - protein, 662 aa, synthetic construct
VPWLTQQPLQLTILVPLQEYQDRILNKTALPEEQKQQLKALFTKYDNLWQHWENQVGHRKIRPHNIATGDYPPRPQKQYPINPKAKPSIQIVIDDLLKQGVLTPQNSTMNTPVYPVPKPDGRWRMVLDYREVNKTIPLTAAQNQHSAGILATIVRQKYKTTLDLANGFWAHPITPDSYWLTAFTWQGKQYCWTRLPQGFLNSPALFNADAVDLLKEVPNVQVYVDDIYLSHDNPHEHIQQLEKVFQILLQAGYVVSLKKSEIGQRTVEFLGFNITKEGRGLTDTFKTKLLNVTPPKDLKQLQSILGLLNFARNFIPNFAELVQTLYNLIASSPGKYIEWTEDNTKQLNKVIEALNTASNLEERLPDQRLVIKVNTSPSAGYVRYYNESGKKPIMYLNYVFSKAELKFSMLEKLLTTMHKALIKAMDLAMGQEILVYSPIVSMTKIQKTPLPERKALPIRWITWMTYLEDPRIQFHYDKTLPELKHIPDVYTSSIPPLKHPSQYEGVFCTDGSAIKSPDPTKSNNAGMGIVHAIYNPEYKILNQWSIPLGHHTAQMAEIAAVEFACKKALKVPGPVLVITDSFYVAESANKELPYWKSNGFVNNKKEPLKHISKWKSIAECLSIKPDITIQHEKGHQPINTSIHTEGNALADKLATQGSYVVN

SEQ ID NO: 8122 - protein, 662 aa, synthetic construct
VPWLTQQPLQLTILVPLQEYQDRILNKTALPEEQKQQLKALFTKYDNLWQHWENQVGHRKIRPHNIATGDYPPRPQKQYPINPKAKPSIQIVIDDLLKQGVLTPQNSTMNTPVYPVPKPDGRWRMVLDYREVNKTIPLTAAQNQHSAGILATIVRQKYKTTLDLANGFWAHPITPDSYWLTAFTWQGKQYCWTRLPQGFLNSPALFNADAVDLLKEVPNVQVYVDDIYLSHDNPHEHIQQLEKVFQILLQAGYVVSLKKSEIGQRTVEFLGFNITKEGRGLTDTFKTKLLNVTPPKDLKQLQSILGKLNFARNFIPNFAELVQTLYNLIASSPGKYIEWTEDNTKQLNKVIEALNTASNLEERLPDQRLVIKVNTSPSAGYVRYYNESGKKPIMYLNYVFSKAELKFSMLEKLLTTMHKALIKAMDLAMGQEILVYSPIVSMTKIQKTPLPERKALPIRWITWMTYLEDPRIQFHYDKTLPELKHIPDVYTSSIPPLKHPSQYEGVFCTDGSAIKSPDPTKSNNAGMGIVHAIYNPEYKILNQWSIPLGHHTAQMAEIAAVEFACKKALKVPGPVLVITDSFYVAESANKELPYWKSNGFVNNKKEPLKHISKWKSIAECLSIKPDITIQHEKGHQPINTSIHTEGNALADKLATQGSYVVN

SEQ ID NO: 8123 - protein, 592 aa, Squirrel monkey retrovirus
PRSRAIDIPVPHADKISWKITDPVWVDQWPLTYEKTLAAIALVQEQLAAGHIEPTNSPWNTPIFIIKKKSGSWRLLQDLRAVNKVMVPMGALQPGLPSPVAIPLNYHKIVIDLKDCFFTIPLHPEDRPYFAFSVPQINFQSPMPRYQWKVLPQGMANSPTLCQKFVAAAIAPVRSQWPEAYILHYMDDILLACDSAEAAKACYAHIISCLTSYGLKIAPDKVQVSEPFSYLGFELHHQQVFTPRVCLKTDHLKTLNDFQKLLGDIQWLRPYLKLPTSALVPLNNILKGDPNPLSVRALTPEAKQSLALINKAIQNQSVQQISYNLPLVLLLLPTPHTPTAVFWQPNGTDPTKNGSPLLWLHLPASPSKVLLTYPSLLAMLIIKGRYTGRQLFGRDPHSIIIPYTQDQLTWLLQTSDEWAIALSSFTGDIDNHYPSDPVIQFAKLHQFIFPKITKCAPIPQATLVFTDGSSNGIAAYVIDNQPISIKSPYLSAQLVELYAILQVFTVLAHQPFNLYTDSAYIAQSVPLLETVPFIKSSTNATPLFSKLQQLILNRQHPFFIGHLRAHLNLPGPLAEGNALADAATQIFPIISD

SEQ ID NO: 8124 - protein, 592 aa, synthetic construct
PRSRAIDIPVPHADKISWKITDPVWVDQWPLTYEKTLAAIALVQEQLAAGHIEPTNSPWNTPIFIIKKKSGSWRLLQDLRAVNKVMVPMGALQPGLPSPVAIPLNYHKIVIDLKDCFFTIPLHPEDRPYFAFSVPQINFQSPMPRYQWKVLPQGMANSPTLCQKFVAAAIAPVRSQWPEAYILHYMDDILLACDSAEAAKACYAHIISCLTSYGLKIAPDKVQVSEPFSYLGFELHHQQVFTPRVCLKTDHLKTLNDFQKLLGDIQWLRPYLKLPTSALVPLNNILKPDPNPLSVRALTPEAKQSLALINKAIQNQSVQQISYNLPLVLLLLPTPHTPTAVFWQPNGTDPTKNGSPLLWLHLPASPSKVLLTYPSLLAMLIIKGRYTGRQLFGRDPHSIIIPYTQDQLTWLLQTSDEWAIALSSFTGDIDNHYPSDPVIQFAKLHQFIFPKITKCAPIPQATLVFTDGSSNGIAAYVIDNQPISIKSPYLSAQLVELYAILQVFTVLAHQPFNLYTDSAYIAQSVPLLETVPFIKSSTNATPLFSKLQQLILNRQHPFFIGHLRAHLNLPGPLAEGNALADAATQIFPIISD

SEQ ID NO: 8125 - protein, 592 aa, synthetic construct
PRSRAIDIPVPHADKISWKITDPVWVDQWPLTYEKTLAAIALVQEQLAAGHIEPTNSPWNTPIFIIKKKSGSWRLLQDLRAVNKVMVPMGALQPGLPSPVAPPLNYHKIVIDLKDCFFTIPLHPEDRPYFAFSVPQINFQSPMPRYQWKVLPQGMANSPTLCQKFVAAAIAPVRSQWPEAYILHYMDDILLACDSAEAAKACYAHIISCLTSYGLKIAPDKVQVSEPFSYLGFELHHQQVFTPRVCLKTDHLKTLNDFQKLLGDIQWLRPYLKLPTSALVPLNNILKPDPNPLSVRALTPEAKQSLALINKAIQNQSVQQISYNLPLVLLLLPTPHTPTAVFWQPNGTDPTKNGSPLLWLHLPASPSKVLLTYPSLLAMLIIKGRYTGRQLFGRDPHSIIIPYTQDQLTWLLQTSDEWAIALSSFTGDIDNHYPSDPVIQFAKLHQFIFPKITKCAPIPQATLVFTDGSSNGIAAYVIDNQPISIKSPYLSAQLVELYAILQVFTVLAHQPFNLYTDSAYIAQSVPLLETVPFIKSSTNATPLFSKLQQLILNRQHPFFIGHLRAHLNLPGPLAEGNALADAATQIFPIISD

SEQ ID NO: 8126 - protein, 585 aa, unidentified
LATAVDILAPQRYADPITWKSDEPVWVDQWPLTQEKLAAAQQLVQEQLQAGHIIESNSPWNTPIFVIKKKSGKWRLLQDLRAVNATMVLMGALQPGLPSPVAIPQGYFKIVIDLKDCFFTIPLQPVDQKRFAFSLPSTNFKQPMKRYQWKVLPQGMANSPTLCQKYVAAAIEPVRKSWAQMYIIHYMDDILIAGKLGEQVLQCFAQLKQALTTTGLQIAPEKVQLQDPYTYLGFQINGPKITNQKAVIRRDKLQTLNDFQKLLGDINWLRPYLHLTTGDLKPLFDILKGDSNPNSPRSLSEAALASLQKVETAIAEQFVTQIDYTQPLTFLIFNTTLTPTGLFWQNNPVMWVHLPASPKKVLLPYYDAIADLIILGRDNSKKYFGLEPSTIIQPYSKSQIHWLMQNTETWPIACASYAGNIDNHYPPNKLIQFCKLHAVVFPRIISKTPLDNALLVFTDGSSTGIAAYTFEKTTVRFKTSHTSAQLVELQALIAVLSAFPHRALNVYTDSAYLAHSIPLLETVSHIKHISDTAKFFLQCQQLIYNRSIPFYLGHIRAHSGLPGPLSQGNHITDLATKVVATTLTT

SEQ ID NO: 8127 - protein, 585 aa, synthetic construct
LATAVDILAPQRYADPITWKSDEPVWVDQWPLTQEKLAAAQQLVQEQLQAGHIIESNSPWNTPIFVIKKKSGKWRLLQDLRAVNATMVLMGALQPGLPSPVAPPQGYFKIVIDLKDCFFTIPLQPVDQKRFAFSLPSTNFKQPMKRYQWKVLPQGMANSPTLCQKYVAAAIEPVRKSWAQMYIIHYMDDILIAGKLGEQVLQCFAQLKQALTTTGLQIAPEKVQLQDPYTYLGFQINGPKITNQKAVIRRDKLQTLNDFQKLLGDINWLRPYLHLTTGDLKPLFDILKGDSNPNSPRSLSEAALASLQKVETAIAEQFVTQIDYTQPLTFLIFNTTLTPTGLFWQNNPVMWVHLPASPKKVLLPYYDAIADLIILGRDNSKKYFGLEPSTIIQPYSKSQIHWLMQNTETWPIACASYAGNIDNHYPPNKLIQFCKLHAVVFPRIISKTPLDNALLVFTDGSSTGIAAYTFEKTTVRFKTSHTSAQLVELQALIAVLSAFPHRALNVYTDSAYLAHSIPLLETVSHIKHISDTAKFFLQCQQLIYNRSIPFYLGHIRAHSGLPGPLSQGNHITDLATKVVATTLTT

SEQ ID NO: 8128 - protein, 650 aa, Walleye dermal sarcoma virus
SCQTKNTLNIDEYLLQFPDQLWASLPTDIGRMLVPPITIKIKDNASLPSIRQYPLPKDKTEGLRPLISSLENQGILIKCHSPCNTPIFPIKKAGRDEYRMIHDLRAINNIVAPLTAVVASPTTVLSNLAPSLHWFTVIDLSNAFFSVPIHKDSQYLFAFTFEGHQYTWTVLPQGFIHSPTLFSQALYQSLHKIKFKISSEICIYMDDVLIASKDRDTNLKDTAVMLQHLASEGHKVSKKKLQLCQQEVVYLGQLLTPEGRKILPDRKVTVSQFQQPTTIRQIRAFLGLVGYCRHWIPEFSIHSKFLEKQLKKDTAEPFQLDDQQVEAFNKLKHAITTAPVLVVPDPAKPFQLYTSHSEHASIAVLTQKHAGRTRPIAFLSSKFDAIESGLPPCLKACASIHRSLTQADSFILGAPLIIYTTHAICTLLQRDRSQLVTASRFSKWEADLLRPELTFVACSAVSPAHLYMQSCENNIPPHDCVLLTHTISRPRPDLSDLPIPDPDMTLFSDGSYTTGRGGAAVVMHRPVTDDFIIIHQQPGGASAQTAELLALAAACHLATDKTVNIYTDSRYAYGVVHDFGHLWMHRGFVTSAGTPIKNHKEIEYLLKQIMKPKQVSVIKIEAHTKGVSMEVRGNAAADEAAKNAVFLVQR

SEQ ID NO: 8129 - protein, 650 aa, synthetic construct
SCQTKNTLNIDEYLLQFPDQLWASLPTDIGRMLVPPITIKIKDNASLPSIRQYPLPKDKTEGLRPLISSLENQGILIKCHSPCNTPIFPIKKAGRDEYRMIHDLRAINNIVAPLTAVVASPTTVLSNLAPSLHWFTVIDLSNAFFSVPIHKDSQYLFAFTFEGHQYTWTVLPQGFIHSPTLFNQALYQSLHKIKFKISSEICIYMDDVLIASKDRDTNLKDTAVMLQHLASEGHKVSKKKLQLCQQEVVYLGQLLTPEGRKILPDRKVTVSQFQQPTTIRQIRAFLGLVGYCRHWIPEFSIHSKFLEKQLKPDTAEPFQLDDQQVEAFNKLKHAITTAPVLVVPDPAKPFQLYTSHSEHASIAVLTQKHAGRTRPIAFLSSKFDAIESGLPPCLKACASIHRSLTQADSFILGAPLIIYTTHAICTLLQRDRSQLVTASRFSKWEADLLRPELTFVACSAVSPAHLYMQSCENNIPPHDCVLLTHTISRPRPDLSDLPIPDPDMTLFSDGSYTTGRGGAAVVMHRPVTDDFIIIHQQPGGASAQTAELLALAAACHLATDKTVNIYTDSRYAYGVVHDFGHLWMHRGFVTSAGTPIKNHKEIEYLLKQIMKPKQVSVIKIEAHTKGVSMEVRGNAAADEAAKNAVFLVQR

SEQ ID NO: 8130 - protein, 650 aa, synthetic construct
SCQTKNTLNIDEYLLQFPDQLWASLPTDIGRMLVPPITIKIKDNASLPSIRQYPLPKDKTEGLRPLISSLENQGILIKCHSPCNTPIFPIKKAGRDEYRMIHDLRAINNIVAPLTAVVASPTTVLSNLAPSLHWFTVIDLSNAFFSVPIHKDSQYLFAFTFEGHQYTWTVLPQGFIHSPTLFNQALYQSLHKIKFKISSEICIYMDDVLIASKDRDTNLKDTAVMLQHLASEGHKVSKKKLQLCQQEVVYLGQLLTPEGRKILPDRKVTVSQFQQPTTIRQIRAFLGKVGYCRHFIPEFSIHSKFLEKQLKPDTAEPFQLDDQQVEAFNKLKHAITTAPVLVVPDPAKPFQLYTSHSEHASIAVLTQKHAGRTRPIAFLSSKFDAIESGLPPCLKACASIHRSLTQADSFILGAPLIIYTTHAICTLLQRDRSQLVTASRFSKWEADLLRPELTFVACSAVSPAHLYMQSCENNIPPHDCVLLTHTISRPRPDLSDLPIPDPDMTLFSDGSYTTGRGGAAVVMHRPVTDDFIIIHQQPGGASAQTAELLALAAACHLATDKTVNIYTDSRYAYGVVHDFGHLWMHRGFVTSAGTPIKNHKEIEYLLKQIMKPKQVSVIKIEAHTKGVSMEVRGNAAADEAAKNAVFLVQR

SEQ ID NO: 8131 - protein, 669 aa, Woolly monkey sarcoma virus
VLNLEEEYRLHEKPVPSSIDPSWLQLFPTVWAERAGMGLANQVPPVVVELRSGASPVAVRQYPMSKEAREGIRPHIQRFLDLGVLVPCQSPWNTPLLPVKKPGTNDYRPVQDLREINKRVQDIHPTVPNPYNLLSSLPPSHTWYSVLDLKDAFFCLKLHPNSQPLFAFEWRDPEKGNTGQLTWTRLPQGFKNSPTLFDEALHRDLAPFRALNPQVVLLQYVDDLLVAAPTYRDCKEGTQKLLQELSKLGYRVSAKKAQLCQKEVTYLGYLLKEGKRWLTPARKATVMKIPPPTTPRQVREFLGTAGFCRLWIPGFASLAAPLYPLTKESIPFIWTEEHQKAFDRIKEALLSAPALALPDLTKPFTLYVDERAGVARGVLTQTLGPWRRPVAYLSKKLDPVASGWPTCLKAVAAVALLLKDADKLTLGQNVTVIASHSLESIVRQPPDRWMTNARMTHYQSLLLNERVSFAPPAVLNPATLLPVESEATPVHRCSEILAEETGTRRDLKDQPLPGVPAWYTDGSSFIAEGKRRAGAAIVDGKRTVWASSLPEGTSAQKAELVALTQALRLAEGKDINIYTDSRYAFATAHIHGAIYKQRGLLTSAGKDIKNKEEILALLEAIHLPKRVAIIHCPGHQKGNDPVATGNRRADEAAKQAALSTRVLAETTKP

SEQ ID NO: 8132 - protein, 669 aa, synthetic construct
VLNLEEEYRLHEKPVPSSIDPSWLQLFPTVWAERAGMGLANQVPPVVVELRSGASPVAVRQYPMSKEAREGIRPHIQRFLDLGVLVPCQSPWNTPLLPVKKPGTNDYRPVQDLREINKRVQDIHPTVPNPYNLLSSLPPSHTWYSVLDLKDAFFCLKLHPNSQPLFAFEWRDPEKGNTGQLTWTRLPQGFKNSPTLFNEALHRDLAPFRALNPQVVLLQYVDDLLVAAPTYRDCKEGTQKLLQELSKLGYRVSAKKAQLCQKEVTYLGYLLKEGKRWLTPARKATVMKIPPPTTPRQVREFLGTAGFCRLWIPGFASLAAPLYPLTKPSIPFIWTEEHQKAFDRIKEALLSAPALALPDLTKPFTLYVDERAGVARGVLTQTLGPWRRPVAYLSKKLDPVASGWPTCLKAVAAVALLLKDADKLTLGQNVTVIASHSLESIVRQPPDRWMTNARMTHYQSLLLNERVSFAPPAVLNPATLLPVESEATPVHRCSEILAEETGTRRDLKDQPLPGVPAWYTDGSSFIAEGKRRAGAAIVDGKRTVWASSLPEGTSAQKAELVALTQALRLAEGKDINIYTDSRYAFATAHIHGAIYKQRGWLTSAGKDIKNKEEILALLEAIHLPKRVAIIHCPGHQKGNDPVATGNRRADEAAKQAALSTRVLAETTKP

SEQ ID NO: 8133 - protein, 669 aa, synthetic construct
VLNLEEEYRLHEKPVPSSIDPSWLQLFPTVWAERAGMGLANQVPPVVVELRSGASPVAVRQYPMSKEAREGIRPHIQRFLDLGVLVPCQSPWNTPLLPVKKPGTNDYRPVQDLREINKRVQDIHPTVPNPYNLLSSLPPSHTWYSVLDLKDAFFCLKLHPNSQPLFAFEWRDPEKGNTGQLTWTRLPQGFKNSPTLFNEALHRDLAPFRALNPQVVLLQYVDDLLVAAPTYRDCKEGTQKLLQELSKLGYRVSAKKAQLCQKEVTYLGYLLKEGKRWLTPARKATVMKIPPPTTPRQVREFLGKAGFCRLFIPGFASLAAPLYPLTKPSIPFIWTEEHQKAFDRIKEALLSAPALALPDLTKPFTLYVDERAGVARGVLTQTLGPWRRPVAYLSKKLDPVASGWPTCLKAVAAVALLLKDADKLTLGQNVTVIASHSLESIVRQPPDRWMTNARMTHYQSLLLNERVSFAPPAVLNPATLLPVESEATPVHRCSEILAEETGTRRDLKDQPLPGVPAWYTDGSSFIAEGKRRAGAAIVDGKRTVWASSLPEGTSAQKAELVALTQALRLAEGKDINIYTDSRYAFATAHIHGAIYKQRGWLTSAGKDIKNKEEILALLEAIHLPKRVAIIHCPGHQKGNDPVATGNRRADEAAKQAALSTRVLAETTKP

SEQ ID NO: 8134 - protein, 671 aa, unidentified
TLNIEDEYRLHETSKEPDVPLGSTWLSDFPQAWAETGGMGLAVRQAPLIIPLKATSTPVSIKQYPMSQEARLGIKPHIQRLLDQGILVPCQSPWNTPLLPVKKPGTNDYRPVQDLREVNKRVEDIHPTVPNPYNLLSGLPPSHQWYTVLDLKDAFFCLRLHPTSQPLFAFEWRDPEMGISGQLTWTRLPQGFKNSPTLFDEALHRDLADFRIQHPDLILLQYVDDLLLAATSEQDCQRGTRALLQTLGNLGYRASAKKAQICQKQVKYLGYLLKEGQRWLTEARKETVMGQPTPKTPRQLREFLGTAGFCRLWIPGFAEMAAPLYPLTKTGTLFNWGPDQQKAYQEIKQALLTAPALGLPDLTKPFELFVDEKQGYAKGVLTQKLGPWRRPVAYLSKKLDPVAAGWPPCLRMVAAIAVLTKDAGKLTMGQPLVILAPHAVEALVKQPPDRWLSNARMTHYQAMLLDTDRVQFGPVVALNPATLLPLPEKEAPHDCLEILAETHGTRPDLTDQPIPDADYTWYTDGSSFLQEGQRRAGAAVTTETEVIWARALPAGTSAQRAELIALTQALKMAEGKKLNVYTDSRYAFATAHVHGEIYRRRGLLTSEGREIKNKNEILALLKALFLPKRLSIIHCPGHQKGNSAEARGNRMADQAAREAAMKAVLETSTLL

SEQ ID NO: 8135 - protein, 671 aa, synthetic construct
TLNIEDEYRLHETSKEPDVPLGSTWLSDFPQAWAETGGMGLAVRQAPLIIPLKATSTPVSIKQYPMSQEARLGIKPHIQRLLDQGILVPCQSPWNTPLLPVKKPGTNDYRPVQDLREVNKRVEDIHPTVPNPYNLLSGLPPSHQWYTVLDLKDAFFCLRLHPTSQPLFAFEWRDPEMGISGQLTWTRLPQGFKNSPTLFNEALHRDLADFRIQHPDLILLQYVDDLLLAATSEQDCQRGTRALLQTLGNLGYRASAKKAQICQKQVKYLGYLLKEGQRWLTEARKETVMGQPTPKTPRQLREFLGTAGFCRLWIPGFAEMAAPLYPLTKPGTLFNWGPDQQKAYQEIKQALLTAPALGLPDLTKPFELFVDEKQGYAKGVLTQKLGPWRRPVAYLSKKLDPVAAGWPPCLRMVAAIAVLTKDAGKLTMGQPLVILAPHAVEALVKQPPDRWLSNARMTHYQAMLLDTDRVQFGPVVALNPATLLPLPEKEAPHDCLEILAETHGTRPDLTDQPIPDADYTWYTDGSSFLQEGQRRAGAAVTTETEVIWARALPAGTSAQRAELIALTQALKMAEGKKLNVYTDSRYAFATAHVHGEIYRRRGWLTSEGREIKNKNEILALLKALFLPKRLSIIHCPGHQKGNSAEARGNRMADQAAREAAMKAVLETSTLL

SEQ ID NO: 8136 - protein, 671 aa, synthetic construct
TLNIEDEYRLHETSKEPDVPLGSTWLSDFPQAWAETGGMGLAVRQAPLIIPLKATSTPVSIKQYPMSQEARLGIKPHIQRLLDQGILVPCQSPWNTPLLPVKKPGTNDYRPVQDLREVNKRVEDIHPTVPNPYNLLSGLPPSHQWYTVLDLKDAFFCLRLHPTSQPLFAFEWRDPEMGISGQLTWTRLPQGFKNSPTLFNEALHRDLADFRIQHPDLILLQYVDDLLLAATSEQDCQRGTRALLQTLGNLGYRASAKKAQICQKQVKYLGYLLKEGQRWLTEARKETVMGQPTPKTPRQLREFLGKAGFCRLFIPGFAEMAAPLYPLTKPGTLFNWGPDQQKAYQEIKQALLTAPALGLPDLTKPFELFVDEKQGYAKGVLTQKLGPWRRPVAYLSKKLDPVAAGWPPCLRMVAAIAVLTKDAGKLTMGQPLVILAPHAVEALVKQPPDRWLSNARMTHYQAMLLDTDRVQFGPVVALNPATLLPLPEKEAPHDCLEILAETHGTRPDLTDQPIPDADYTWYTDGSSFLQEGQRRAGAAVTTETEVIWARALPAGTSAQRAELIALTQALKMAEGKKLNVYTDSRYAFATAHVHGEIYRRRGWLTSEGREIKNKNEILALLKALFLPKRLSIIHCPGHQKGNSAEARGNRMADQAAREAAMKAVLETSTLL

SEQ ID NO: 8137 - protein, 677 aa, unidentified
TLNIEDEYRLHETSKEPDVSLGSTWLSDFPQAWAETGGMGLAVRQAPLIIPLKATSTPVSIKQYPMSQEARLGIKPHIQRLLDQGILVPCQSPWNTPLLPVKKPGTNDYRPVQDLREVNKRVEDIHPTVPNPYNLLSGLPPSHQWYTVLDLKDAFFCLRLHPTSQPLFAFEWRDPEMGISGQLTWTRLPQGFKNSPTLFNEALHRDLADFRIQHPDLILLQYVDDLLLAATSELDCQQGTRALLQTLGNLGYRASAKKAQICQKQVKYLGYLLKEGQRWLTEARKETVMGQPTPKTPRQLREFLGKAGFCRLFIPGFAEMAAPLYPLTKPGTLFNWGPDQQKAYQEIKQALLTAPALGLPDLTKPFELFVDEKQGYAKGVLTQKLGPWRRPVAYLSKKLDPVAAGWPPCLRMVAAIAVLTKDAGKLTMGQPLVILAPHAVEALVKQPPDRWLSNARMTHYQALLLDTDRVQFGPVVALNPATLLPLPEEGLQHNCLDILAEAHGTRPDLTDQPLPDADHTWYTDGSSLLQEGQRKAGAAVTTETEVIWAKALPAGTSAQRAELIALTQALKMAEGKKLNVYTDSRYAFATAHIHGEIYRRRGWLTSEGKEIKNKDEILALLKALFLPKRLSIIHCPGHQKGHSAEARGNRMADQAARKAAITETPDTSTLLIENSSP

SEQ ID NO: 8138-9000 - skipped (863 entries)

SEQ ID NO: 9001 - protein, 1082 aa, Neisseria meningitidis
MAAFKPNPINYILGLDIGIASVGWAMVEIDEEENPIRLIDLGVRVFERAEVPKTGDSLAMARRLARSVRRLTRRRAHRLLRARRLLKREGVLQAADFDENGLIKSLPNTPWQLRAAALDRKLTPLEWSAVLLHLIKHRGYLSQRKNEGETADKELGALLKGVANNAHALQTGDFRTPAELALNKFEKESGHIRNQRGDYSHTFSRKDLQAELILLFEKQKEFGNPHVSGGLKEGIETLLMTQRPALSGDAVQKMLGHCTFEPAEPKAAKNTYTAERFIWLTKLNNLRILEQGSERPLTDTERATLMDEPYRKSKLTYAQARKLLGLEDTAFFKGLRYGKDNAEASTLMEMKAYHAISRALEKEGLKDKKSPLNLSSELQDEIGTAFSLFKTDEDITGRLKDRVQPEILEALLKHISFDKFVQISLKALRRIVPLMEQGKRYDEACAEIYGDHYGKKNTEEKIYLPPIPADEIRNPVVLRALSQARKVINGVVRRYGSPARIHIETAREVGKSFKDRKEIEKRQEENRKDREKAAAKFREYFPNFVGEPKSKDILKLRLYEQQHGKCLYSGKEINLVRLNEKGYVEIDHALPFSRTWDDSFNNKVLVLGSENQNKGNQTPYEYFNGKDNSREWQEFKARVETSRFPRSKKQRILLQKFDEDGFKECNLNDTRYVNRFLCQFVADHILLTGKGKRRVFASNGQITNLLRGFWGLRKVRAENDRHHALDAVVVACSTVAMQQKITRFVRYKEMNAFDGKTIDKETGKVLHQKTHFPQPWEFFAQEVMIRVFGKPDGKPEFEEADTPEKLRTLLAEKLSSRPEAVHEYVTPLFVSRAPNRKMSGAHKDTLRSAKRFVKHNEKISVKRVWLTEIKLADLENMVNYKNGREIELYEALKARLEAYGGNAKQAFDPKDNPFYKKGGQLVKAVRVEKTQESGVLLNKKNAYTIADNGDMVRVDVFCKVDKKGKNQYFIVPIYAWQVAENILPDIDCKGYRIDDSYTFCFSLHKYDLIAFQKDEKSKVEFAYYINCDSSNGRFYLAWHDKGSKEQQFRISTQNLVLIQKYQVNELGKEIRPCRLKKRPPVR

SEQ ID NO: 9002 - protein, 1055 aa, Pasteurella pneumotropica
MQNNPLNYILGLDLGIASIGWAVVEIDEESSPIRLIDVGVRTFERAEVAKTGESLALSRRLARSSRRLIKRRAERLKKAKRLLKAEKILHSIDEKLPINVWQLRVKGLKEKLERQEWAAVLLHLSKHRGYLSQRKNEGKSDNKELGALLSGIASNHQMLQSSEYRTPAEIAVKKFQVEEGHIRNQRGSYTHTFSRLDLLAEMELLFQRQAELGNSYTSTTLLENLTALLMWQKPALAGDAILKMLGKCTFEPSEYKAAKNSYSAERFVWLTKLNNLRILENGTERALNDNERFALLEQPYEKSKLTYAQVRAMLALSDNAIFKGVRYLGEDKKTVESKTTLIEMKFYHQIRKTLGSAELKKEWNELKGNSDLLDEIGTAFSLYKTDDDICRYLEGKLPERVLNALLENLNFDKFIQLSLKALHQILPLMLQGQRYDEAVSAIYGDHYGKKSTETTRLLPTIPADEIRNPVVLRTLTQARKVINAVVRLYGSPARIHIETAREVGKSYQDRKKLEKQQEDNRKQRESAVKKFKEMFPHFVGEPKGKDILKMRLYELQQAKCLYSGKSLELHRLLEKGYVEVDHALPFSRTWDDSFNNKVLVLANENQNKGNLTPYEWLDGKNNSERWQHFVVRVQTSGFSYAKKQRILNHKLDEKGFIERNLNDTRYVARFLCNFIADNMLLVGKGKRNVFASNGQITALLRHRWGLQKVREQNDRHHALDAVVVACSTVAMQQKITRFVRYNEGNVFSGERIDRETGEIIPLHFPSPWAFFKENVEIRIFSENPKLELENRLPDYPQYNHEWVQPLFVSRMPTRKMTGQGHMETVKSAKRLNEGLSVLKVPLTQLKLSDLERMVNRDREIALYESLKARLEQFGNDPAKAFAEPFYKKGGALVKAVRLEQTQKSGVLVRDGNGVADNASMVRVDVFTKGGKYFLVPIYTWQVAKGILPNRAATQGKDENDWDIMDEMATFQFSLCQNDLIKLVTKKKTIFGYFNGLNRATSNINIKEHDLDKSKGKLGIYLEVGVKLAISLEKYQVDELGKNIRPCRPTKRQHVR

SEQ ID NO: 9003 - protein, 1053 aa, Staphylococcus aureus
MKRNYILGLDIGITSVGYGIIDYETRDVIDAGVRLFKEANVENNEGRRSKRGARRLKRRRRHRIQRVKKLLFDYNLLTDHSELSGINPYEARVKGLSQKLSEEEFSAALLHLAKRRGVHNVNEVEEDTGNELSTKEQISRNSKALEEKYVAELQLERLKKDGEVRGSINRFKTSDYVKEAKQLLKVQKAYHQLDQSFIDTYIDLLETRRTYYEGPGEGSPFGWKDIKEWYEMLMGHCTYFPEELRSVKYAYNADLYNALNDLNNLVITRDENEKLEYYEKFQIIENVFKQKKKPTLKQIAKEILVNEEDIKGYRVTSTGKPEFTNLKVYHDIKDITARKEIIENAELLDQIAKILTIYQSSEDIQEELTNLNSELTQEEIEQISNLKGYTGTHNLSLKAINLILDELWHTNDNQIAIFNRLKLVPKKVDLSQQKEIPTTLVDDFILSPVVKRSFIQSIKVINAIIKKYGLPNDIIIELAREKNSKDAQKMINEMQKRNRQTNERIEEIIRTTGKENAKYLIEKIKLHDMQEGKCLYSLEAIPLEDLLNNPFNYEVDHIIPRSVSFDNSFNNKVLVKQEENSKKGNRTPFQYLSSSDSKISYETFKKHILNLAKGKGRISKTKKEYLLEERDINRFSVQKDFINRNLVDTRYATRGLMNLLRSYFRVNNLDVKVKSINGGFTSFLRRKWKFKKERNKGYKHHAEDALIIANADFIFKEWKKLDKAKKVMENQMFEEKQAESMPEIETEQEYKEIFITPHQIKHIKDFKDYKYSHRVDKKPNRELINDTLYSTRKDDKGNTLIVNNLNGLYDKDNDKLKKLINKSPEKLLMYHHDPQTYQKLKLIMEQYGDEKNPLYKYYEETGNYLTKYSKKDNGPVIKKIKYYGNKLNAHLDITDDYPNSRNKVVKLSLKPYRFDVYLDNGVYKFVTVKNLDVIKKENYYEVNSKCYEEAKKLKKISNQAEFIASFYNNDLIKINGELYRVIGVNNDLLNRIEVNMIDITYREYLENMNDKRPPRIIKTIASKTQSIKKYSTDILGNLYEVKSKKHPQIIKKG

SEQ ID NO: 9004 - protein, 1053 aa, Staphylococcus aureus
MKRNYILGLDIGITSVGYGIIDYETRDVIDAGVRLFKEANVENNEGRRSKRGARRLKRRRRHRIQRVKKLLFDYNLLTDHSELSGINPYEARVKGLSQKLSEEEFSAALLHLAKRRGVHNVNEVEEDTGNELSTKEQISRNSKALEEKYVAELQLERLKKDGEVRGSINRFKTSDYVKEAKQLLKVQKAYHQLDQSFIDTYIDLLETRRTYYEGPGEGSPFGWKDIKEWYEMLMGHCTYFPEELRSVKYAYNADLYNALNDLNNLVITRDENEKLEYYEKFQIIENVFKQKKKPTLKQIAKEILVNEEDIKGYRVTSTGKPEFTNLKVYHDIKDITARKEIIENAELLDQIAKILTIYQSSEDIQEELTNLNSELTQEEIEQISNLKGYTGTHNLSLKAINLILDELWHTNDNQIAIFNRLKLVPKKVDLSQQKEIPTTLVDDFILSPVVKRSFIQSIKVINAIIKKYGLPNDIIIELAREKNSKDAQKMINEMQKRNRQTNERIEEIIRTTGKENAKYLIEKIKLHDMQEGKCLYSLEAIPLEDLLNNPFNYEVDHIIPRSVSFDNSFNNKVLVKQEENSKKGNRTPFQYLSSSDSKISYETFKKHILNLAKGKGRISKTKKEYLLEERDINRFSVQKDFINRNLVDTRYATRGLMNLLRSYFRVNNLDVKVKSINGGFTSFLRRKWKFKKERNKGYKHHAEDALIIANADFIFKEWKKLDKAKKVMENQMFEEKQAESMPEIETEQEYKEIFITPHQIKHIKDFKDYKYSHRVDKKPNRKLINDTLYSTRKDDKGNTLIVNNLNGLYDKDNDKLKKLINKSPEKLLMYHHDPQTYQKLKLIMEQYGDEKNPLYKYYEETGNYLTKYSKKDNGPVIKKIKYYGNKLNAHLDITDDYPNSRNKVVKLSLKPYRFDVYLDNGVYKFVTVKNLDVIKKENYYEVNSKCYEEAKKLKKISNQAEFIASFYKNDLIKINGELYRVIGVNNDLLNRIEVNMIDITYREYLENMNDKRPPHIIKTIASKTQSIKKYSTDILGNLYEVKSKKHPQIIKKG

SEQ ID NO: 9005 - protein, 1061 aa, Staphylococcus auricularis
MQENQQKQNYILGLDIGITSVGYGLIDSKTREVIDAGVRLFPEADSENNSNRRSKRGARRLKRRRIHRLNRVKDLLADYQMIDLNNVPKSTDPYTIRVKGLREPLTKEEFAIALLHIAKRRGLHNISVSMGDEEQDNELSTKQQLQKNAQQLQDKYVCELQLERLTNINKVRGEKNRFKTEDFVKEVKQLCETQRQYHNIDDQFIQQYIDLVSTRREYFEGPGNGSPYGWDGDLLKWYEKLMGRCTYFPEELRSVKYAYSADLFNALNDLNNLVVTRDDNPKLEYYEKYHIIENVFKQKKNPTLKQIAKEIGVQDYDIRGYRITKSGKPQFTSFKLYHDLKNIFEQAKYLEDVEMLDEIAKILTIYQDEISIKKALDQLPELLTESEKSQIAQLTGYTGTHRLSLKCIHIVIDELWESPENQMEIFTRLNLKPKKVEMSEIDSIPTTLVDEFILSPVVKRAFIQSIKVINAVINRFGLPEDIIIELAREKNSKDRRKFINKLQKQNEATRKKIEQLLAKYGNTNAKYMIEKIKLHDMQEGKCLYSLEAIPLEDLLSNPTHYEVDHIIPRSVSFDNSLNNKVLVKQSENSKKGNRTPYQYLSSNESKISYNQFKQHILNLSKAKDRISKKKRDMLLEERDINKFEVQKEFINRNLVDTRYATRELSNLLKTYFSTHDYAVKVKTINGGFTNHLRKVWDFKKHRNHGYKHHAEDALVIANADFLFKTHKALRRTDKILEQPGLEVNDTTVKVDTEEKYQELFETPKQVKNIKQFRDFKYSHRVDKKPNRQLINDTLYSTREIDGETYVVQTLKDLYAKDNEKVKKLFTERPQKILMYQHDPKTFEKLMTILNQYAEAKNPLAAYYEDKGEYVTKYAKKGNGPAIHKIKYIDKKLGSYLDVSNKYPETQNKLVKLSLKSFRFDIYKCEQGYKMVSIGYLDVLKKDNYYYIPKDKYEAEKQKKKIKESDLFVGSFYYNDLIMYEDELFRVIGVNSDINNLVELNMVDITYKDFCEVNNVTGEKRIKKTIGKRVVLIEKYTTDILGNLYKTPLPKKPQLIFKRGEL

SEQ ID NO: 9006 - protein, 1061 aa, Staphylococcus auricularis
MQENQQKQNYILGLDIGITSVGYGLIDSKTREVIDAGVRLFPEADSENNSNRRSKRGARRLKRRRIHRLNRVKDLLADYQMIDLNNVPKSTDPYTIRVKGLREPLTKEEFAIALLHIAKRRGLHNISVSMGDEEQDNELSTKQQLQKNAQQLQDKYVCELQLERLTNINKVRGEKNRFKTEDFVKEVKQLCETQRQYHNIDDQFIQQYIDLVSTRREYFEGPGNGSPYGWDGDLLKWYEKLMGRCTYFPEELRSVKYAYSADLFNALNDLNNLVVTRDDNPKLEYYEKYHIIENVFKQKKNPTLKQIAKEIGVQDYDIRGYRITKSGKPQFTSFKLYHDLKNIFEQAKYLEDVEMLDEIAKILTIYQDEISIKKALDQLPELLTESEKSQIAQLTGYTGTHRLSLKCIHIVIDELWESPENQMEIFTRLNLKPKKVEMSEIDSIPTTLVDEFILSPVVKRAFIQSIKVINAVINRFGLPEDIIIELAREKNSKDRRKFINKLQKQNEATRKKIEQLLAKYGNTNAKYMIEKIKLHDMQEGKCLYSLEAIPLEDLLSNPTHYEVDHIIPRSVSFDNSLNNKVLVKQSENSKKGNRTPYQYLSSNESKISYNQFKQHILNLSKAKDRISKKKRDMLLEERDINKFEVQKEFINRNLVDTRYATRELSNLLKTYFSTHDYAVKVKTINGGFTNHLRKVWDFKKHRNHGYKHHAEDALVIANADFLFKTHKALRRTDKILEQPGLEVNDTTVKVDTEEKYQELFETPKQVKNIKQFRDFKYSHRVDKKPNRKLINDTLYSTREIDGETYVVQTLKDLYAKDNEKVKKLFTERPQKILMYQHDPKTFEKLMTILNQYAEAKNPLAAYYEDKGEYVTKYAKKGNGPAIHKIKYIDKKLGSYLDVSNKYPETQNKLVKLSLKSFRFDIYKCEQGYKMVSIGYLDVLKKDNYYYIPKDKYEAEKQKKKIKESDLFVGSFYKNDLIMYEDELFRVIGVNSDINNLVELNMVDITYKDFCEVNNVTGEKHIKKTIGKRVVLIEKYTTDILGNLYKTPLPKKPQLIFKRGEL

SEQ ID NO: 9007 - protein, 1375 aa, Streptococcus canis
MEKKYSIGLDIGTNSVGWAVITDDYKVPSKKFKVLGNTNRKSIKKNLMGALLFDSGETAEATRLKRTARRRYTRRKNRIRYLQEIFANEMAKLDDSFFQRLEESFLVEEDKKNERHPIFGNLADEVAYHRNYPTIYHLRKKLADSPEKADLRLIYLALAHIIKFRGHFLIEGKLNAENSDVAKLFYQLIQTYNQLFEESPLDEIEVDAKGILSARLSKSKRLEKLIAVFPNEKKNGLFGNIIALALGLTPNFKSNFDLTEDAKLQLSKDTYDDDLDELLGQIGDQYADLFSAAKNLSDAILLSDILRSNSEVTKAPLSASMVKRYDEHHQDLALLKTLVRQQFPEKYAEIFKDDTKNGYAGYVGADKKLRKRSGKLATEEEFYKFIKPILEKMDGAEELLAKLNRDDLLRKQRTFDNGSIPHQIHLKELHAILRRQEEFYPFLKENREKIEKILTFRIPYYVGPLARGNSRFAWLTRKSEEAITPWNFEEVVDKGASAQSFIERMTNFDEQLPNKKVLPKHSLLYEYFTVYNELTKVKYVTERMRKPEFLSGEQKKAIVDLLFKTNRKVTVKQLKEDYFKKIECFDSVEIIGVEDRFNASLGTYHDLLKIIKDKDFLDNEENEDILEDIVLTLTLFEDREMIEERLKTYAHLFDDKVMKQLKRRHYTGWGRLSRKMINGIRDKQSGKTILDFLKSDGFSNRNFMQLIHDDSLTFKEEIEKAQVSGQGDSLHEQIADLAGSPAIKKGILQTVKIVDELVKVMGHKPENIVIEMARENQTTTKGLQQSRERKKRIEEGIKELESQILKENPVENTQLQNEKLYLYYLQNGRDMYVDQELDINRLSDYDVDHIVPQSFIKDDSIDNKVLTRSVENRGKSDNVPSEEVVKKMKNYWRQLLNAKLITQRKFDNLTKAERGGLSEADKAGFIKRQLVETRQITKHVARILDSRMNTKRDKNDKPIREVKVITLKSKLVSDFRKDFQLYKVRDINNYHHAHDAYLNAVVGTALIKKYPKLESEFVYGDYKVYDVRKMIAKSEQEIGKATAKRFFYSNIMNFFKTEVKLANGEIRKRPLIETNGETGEVVWNKEKDFATVRKVLAMPQVNIVKKTEVQTGGFSKESILSKRESAKLIPRKKGWDTRKYGGFGSPTVAYSILVVAKVEKGKAKKLKSVKVLVGITIMEKGSYEKDPIGFLEAKGYKDIKKELIFKLPKYSLFELENGRRRMLASAKELQKANELVLPQHLVRLLYYTQNISATTGSNNLGYIEQHREEFKEIFEKIIDFSEKYILKNKVNSNLKSSFDEQFAVSDSILLSNSFVSLLKYTSFGASGGFTFLDLDVKQGRLRYQTVTEVLDATLIYQSITGLYETRTDLSQLGGD

SEQ ID NO: 9008 - protein, 1368 aa, Streptococcus pyogenes [sequence omitted]

SEQ ID NO: 9009 - protein, 1368 aa, Streptococcus pyogenes
MDKKYSIGLDIGTNSVGWAVITDEYKVPSKKFKVLGNTDRHSIKKNLIGALLFDSGETAEATRLKRTARRRYTRRKNRICYLQEIFSNEMAKVDDSFFHRLEESFLVEEDKKHERHPIFGNIVDEVAYHEKYPTIYHLRKKLVDSTDKADLRLIYLALAHMIKFRGHFLIEGDLNPDNSDVDKLFIQLVQTYNQLFEENPINASGVDAKAILSARLSKSRRLENLIAQLPGEKKNGLFGNLIALSLGLTPNFKSNFDLAEDAKLQLSKDTYDDDLDNLLAQIGDQYADLFLAAKNLSDAILLSDILRVNTEITKAPLSASMIKRYDEHHQDLTLLKALVRQQLPEKYKEIFFDQSKNGYAGYIDGGASQEEFYKFIKPILEKMDGTEELLVKLNREDLLRKQRTFDNGSIPHQIHLGELHAILRRQEDFYPFLKDNREKIEKILTFRIPYYVGPLARGNSRFAWMTRKSEETITPWNFEEVVDKGASAQSFIERMTNFDKNLPNEKVLPKHSLLYEYFTVYNELTKVKYVTEGMRKPAFLSGEQKKAIVDLLFKTNRKVTVKQLKEDYFKKIECFDSVEISGVEDRFNASLGTYHDLLKIIKDKDFLDNEENEDILEDIVLTLTLFEDREMIEERLKTYAHLFDDKVMKQLKRRRYTGWGRLSRKLINGIRDKQSGKTILDFLKSDGFANRNFMQLIHDDSLTFKEDIQKAQVSGQGDSLHEHIANLAGSPAIKKGILQTVKVVDELVKVMGRHKPENIVIEMARENQTTQKGQKNSRERMKRIEEGIKELGSQILKEHPVENTQLQNEKLYLYYLQNGRDMYVDQELDINRLSDYDVDHIVPQSFLKDDSIDNKVLTRSDKNRGKSDNVPSEEVVKKMKNYWRQLLNAKLITQRKFDNLTKAERGGLSELDKAGFIKRQLVETRQITKHVAQILDSRMNTKYDENDKLIREVKVITLKSKLVSDFRKDFQFYKVREINNYHHAHDAYLNAVVGTALIKKYPKLESEFVYGDYKVYDVRKMIAKSEQEIGKATAKYFFYSNIMNFFKTEITLANGEIRKRPLIETNGETGEIVWDKGRDFATVRKVLSMPQVNIVKKTEVQTGGFSKESIRPKRNSDKLIARKKDWDPKKYGGFVSPTVAYSVLVVAKVEKGKSKKLKSVKELLGITIMERSSFEKNPIDFLEAKGYKEVKKDLIIKLPKYSLFELENGRKRMLASARFLQKGNELALPSKYVNFLYLASHYEKLKGSPEDNEQKQLFVEQHKHYLDEIIEQISEFSKRVILADANLDKVLSAYNKHRDKPIREQAENIIHLFTLTNLGAPRAFKYFDTTIDRKVYRSTKEVLDATLIHQSITGLYETRIDLSQLGGD

SEQ ID NO: 9010 - protein, 1368 aa, Streptococcus pyogenes
MDKKYSIGLDIGTNSVGWAVITDEYKVPSKKFKVLGNTDRHSIKKNLIGALLFDSGETAERTRLKRTARRRYTRRKNRICYLQEIFSNEMAKVDDSFFHRLEESFLVEEDKKHERHPIFGNIVDEVAYHEKYPTIYHLRKKLVDSTDKADLRLIYLALAHMIKFRGHFLIEGDLNPDNSDVDKLFIQLVQTYNQLFEENPINASGVDAKAILSARLSKSRRLENLIAQLPGEKKNGLFGNLIALSLGLTPNFKSNFDLAEDAKLQLSKDTYDDDLDNLLAQIGDQYADLFLAAKNLSDAILLSDILRVNTEITKAPLSASMIKRYDEHHQDLTLLKALVRQQLPEKYKEIFFDQSKNGYAGYIDGGASQEEFYKFIKPILEKMDGTEELLVKLNREDLLRKQRTFDNGSIPHQIHLGELHAILRRQEDFYPFLKDNREKIEKILTFRIPYYVGPLARGNSRFAWMTRKSEETITPWNFEEVVDKGASAQSFIERMTNFDKNLPNEKVLPKHSLLYEYFTVYNELTKVKYVTEGMRKPAFLSGEQKKAIVDLLFKTNRKVTVKQLKEDYFKKIECFDSVEISGVEDRFNASLGTYHDLLKIIKDKDFLDNEENEDILEDIVLTLTLFEDREMIEERLKTYAHLFDDKVMKQLKRRRYTGWGRLSRKLINGIRDKQSGKTILDFLKSDGFANRNFMQLIHDDSLTFKEDIQKAQVSGQGDSLHEHIANLAGSPAIKKGILQTVKVVDELVKVMGRHKPENIVIEMARENQTTQKGQKNSRERMKRIEEGIKELGSQILKEHPVENTQLQNEKLYLYYLQNGRDMYVDQELDINRLSDYDVDHIVPQSFLKDDSIDNKVLTRSDKNRGKSDNVPSEEVVKKMKNYWRQLLNAKLITQRKFDNLTKAERGGLSELDKAGFIKRQLVETRQITKHVAQILDSRMNTKYDENDKLIREVKVITLKSKLVSDFRKDFQFYKVREINNYHHAHDAYLNAVVGTALIKKYPKLESEFVYGDYKVYDVRKMIAKSEQEIGKATAKYFFYSNIMNFFKTEITLANGEIRKRPLIETNGETGEIVWDKGRDFATVRKVLSMPQVNIVKKTEVQTGGFSKESIRPKRNSDKLIARKKDWDPKKYGGFLWPTVAYSVLVVAKVEKGKSKKLKSVKELLGITIMERSSFEKNPIDFLEAKGYKEVKKDLIIKLPKYSLFELENGRKRMLASAKQLQKGNELALPSKYVNFLYLASHYEKLKGSPEDNEQKQLFVEQHKHYLDEIIEQISEFSKRVILADANLDKVLSAYNKHRDKPIREQAENIIHLFTLTRLGAPRAFKYFDTTIDPKQYRSTKEVLDATLIHQSITGLYETRIDLSQLGGD

SEQ ID NO: 9011 - protein, 1121 aa, Streptococcus thermophilus
MSDLVLGLDIGIGSVGVGILNKVTGEIIHKNSRIFPAAQAENNLVRRTNRQGRRLARRKKHRRVRLNRLFEESGLITDFTKISINLNPYQLRVKGLTDELSNEELFIALKNMVKHRGISYLDDASDDGNSSVGDYAQIVKENSKQLETKTPGQIQLERYQTYGQLRGDFTVEKDGKKHRLINVFPTSAYRSEALRILQTQQEFNPQITDEFINRYLEILTGKRKYYHGPGNEKSRTDYGRYRTSGETLDNIFGILIGKCTFYPDEFRAAKASYTAQEFNLLNDLNNLTVPTETKKLSKEQKNQIINYVKNEKAMGPAKLFKYIAKLLSCDVADIKGYRIDKSGKAEIHTFEAYRKMKTLETLDIEQMDRETLDKLAYVLTLNTEREGIQEALEHEFADGSFSQKQVDELVQFRKANSSIFGKGWHNFSVKLMMELIPELYETSEEQMTILTRLGKQKTTSSSNKTKYIDEKLLTEEIYNPVVAKSVRQAIKIVNAAIKEYGDFDNIVIEMARETNEDDEKKAIQKIQKANKDEKDAAMLKAANQYNGKAELPHSVFHGHKQLATKIRLWHQQGERCLYTGKTISIHDLINNSNQFEVDHILPLSITFDDSLANKVLVYATANQEKGQRTPYQALDSMDDAWSFRELKAFVRESKTLSNKKKEYLLTEEDISKFDVRKKFIERNLVDTRYASRVVLNALQEHFRAHKIDTKVSVVRGQFTSQLRRHWGIEKTRDTYHHHAVDALIIAASSQLNLWKKQKNTLVSYSEDQLLDIETGELISDDEYKESVFKAPYQHFVDTLKSKEFEDSILFSYQVDSKFNRKISDATIYATRQAKVGKDKADETYVLGKIKDIYTQDGYDAFMKIYKKDKSKFLMYRHDPQTFEKVIEPILENYPNKQINEKGKEVPCNPFLKYKEEHGYIRKYSKKGNGPEIKSLKYYDSKLGNHIDITPKDSNNKVVLQSVSPWRADVYFNKTTGKYEILGLKYADLQFEKGTGTYKISQEKYNDIKKKEGVDSDSEFKFTLYKNDLLLVKDTETKEQQLFRFLSRTMPKQKHYVELKPYDKQKFEGGEALIKVLGNVANSGQCKKGLGKSNISIYKVRTDVLGNQHIIKNEGDKPKLDF

SEQ ID NO: 9012 - protein, 1092 aa, Brevibacillus laterosporus
MAYTMGIDVGIASCGWAIVDLERQRIIDIGVRTFEKAENPKNGEALAVPRREARSSRRRLRRKKHRIERLKHMFVRNGLAVDIQHLEQTLRSQNEIDVWQLRVDGLDRMLTQKEWLRVLIHLAQRRGFQSNRKTDGSSEDGQVLVNVTENDRLMEEKDYRTVAEMMVKDEKFSDHKRNKNGNYHGVVSRSSLLVEIHTLFETQRQHHNSLASKDFELEYVNIWSAQRPVATKDQIEKMIGTCTFLPKEKRAPKASWHFQYFMLLQTINHIRITNVQGTRSLNKEEIEQVVNMALTKSKVSYHDTRKILDLSEEYQFVGLDYGKEDEKKKVESKETIIKLDDYHKLNKIFNEVELAKGETWEADDYDTVAYALTFFKDDEDIRDYLQNKYKDSKNRLVKNLANKEYTNELIGKVSTLSFRKVGHLSLKALRKIIPFLEQGMTYDKACQAAGFDFQGISKKKRSVVLPVIDQISNPVVNRALTQTRKVINALIKKYGSPETIHIETARELSKTFDERKNITKDYKENRDKNEHAKKHLSELGIINPTGLDIVKYKLWCEQQGRCMYSNQPISFERLKESGYTEVDHIIPYSRSMNDSYNNRVLVMTRENREKGNQTPFEYMGNDTQRWYEFEQRVTTNPQIKKEKRQNLLLKGFTNRRELEMLERNLNDTRYITKYLSHFISTNLEFSPSDKKKKVVNTSGRITSHLRSRWGLEKNRGQNDLHHAMDAIVIAVTSDSFIQQVTNYYKRKERRELNGDDKFPLPWKFFREEVIARLSPNPKEQIEALPNHFYSEDELADLQPIFVSRMPKRSITGEAHQAQFRRVVGKTKEGKNITAKKTALVDISYDKNGDFNMYGRETDPATYEAIKERYLEFGGNVKKAFSTDLHKPKKDGTKGPLIKSVRIMENKTLVHPVNKGKGVVYNSSIVRTDVFQRKEKYYLLPVYVTDVTKGKLPNKVIVAKKGYHDWIEVDDSFTFLFSLYPNDLIFIRQNPKKKISLKKRIESHSISDSKEVQEIHAYYKGVDSSTAAIEFIIHDGSYYAKGVGVQNLDCFEKYQVDILGNYFKVKGEKRLELETSDSNHKGKDVNSIKSTSR

SEQ ID NO: 9013 - protein, 1053 aa, Staphylococcus aureus
MKRNYILGLDIGITSVGYGIIDYETRDVIDAGVRLFKEANVENNEGRRSKRGARRLKRRRRHRIQRVKKLLFDYNLLTDHSELSGINPYEARVKGLSQKLSEEEFSAALLHLAKRRGVHNVNEVEEDTGNELSTKEQISRNSKALEEKYVAELQLERLKKDGEVRGSINRFKTSDYVKEAKQLLKVQKAYHQLDQSFIDTYIDLLETRRTYYEGPGEGSPFGWKDIKEWYEMLMGHCTYFPEELRSVKYAYNADLYNALNDLNNLVITRDENEKLEYYEKFQIIENVFKQKKKPTLKQIAKEILVNEEDIKGYRVTSTGKPEFTNLKVYHDIKDITARKEIIENAELLDQIAKILTIYQSSEDIQEELTNLNSELTQEEIEQISNLKGYTGTHNLSLKAINLILDELWHTNDNQIAIFNRLKLVPKKVDLSQQKEIPTTLVDDFILSPVVKRSFIQSIKVINAIIKKYGLPNDIIIELAREKNSKDAQKMINEMQKRNRQTNERIEEIIRTTGKENAKYLIEKIKLHDMQEGKCLYSLEAIPLEDLLNNPFNYEVDHIIPRSVSFDNSFNNKVLVKQEENSKKGNRTPFQYLSSSDSKISYETFKKHILNLAKGKGRISKTKKEYLLEERDINRFSVQKDFINRNLVDTRYATRGLMNLLRSYFRVNNLDVKVKSINGGFTSFLRRKWKFKKERNKGYKHHAEDALIIANADFIFKEWKKLDKAKKVMENQMFEEKQAESMPEIETEQEYKEIFITPHQIKHIKDFKDYKYSHRVDKKPNRKLINDTLYSTRKDDKGNTLIVNNLNGLYDKDNDKLKKLINKSPEKLLMYHHDPQTYQKLKLIMEQYGDEKNPLYKYYEETGNYLTKYSKKDNGPVIKKIKYYGNKLNAHLDITDDYPNSRNKVVKLSLKPYRFDVYLDNGVYKFVTVKNLDVIKKENYYEVNSKCYEEAKKLKKISNQAEFIASFYKNDLIKINGELYRVIGVNSDKNNLIEVNMIDITYREYLENMNDKRPPHIIKTIASKTQSIKKYSTDILGNLYEVKSKKHPQIIKKG

SEQ ID NO: 9014 - protein, 1053 aa, Staphylococcus aureus
MKRNYILGLDIGITSVGYGIIDYETRDVIDAGVRLFKEANVENNEGRRSKRGARRLKRRRRHRIQRVKKLLFDYNLLTDHSELSGINPYEARVKGLSQKLSEEEFSAALLHLAKRRGVHNVNEVEEDTGNELSTKEQISRNSKALEEKYVAELQLERLKKDGEVRGSINRFKTSDYVKEAKQLLKVQKAYHQLDQSFIDTYIDLLETRRTYYEGPGEGSPFGWKDIKEWYEMLMGHCTYFPEELRSVKYAYNADLYNALNDLNNLVITRDENEKLEYYEKFQIIENVFKQKKKPTLKQIAKEILVNEEDIKGYRVTSTGKPEFTNLKVYHDIKDITARKEIIENAELLDQIAKILTIYQSSEDIQEELTNLNSELTQEEIEQISNLKGYTGTHNLSLKAINLILDELWHTNDNQIAIFNRLKLVPKKVDLSQQKEIPTTLVDDFILSPVVKRSFIQSIKVINAIIKKYGLPNDIIIELAREKNSKDAQKMINEMQKRNRQTNERIEEIIRTTGKENAKYLIEKIKLHDMQEGKCLYSLEAIPLEDLLNNPFNYEVDHIIPRSVSFDNSFNNKVLVKQEENSKKGNRTPFQYLSSSDSKISYETFKKHILNLAKGKGRISKTKKEYLLEERDINRFSVQKDFINRNLVDTRYATRGLMNLLRSYFRVNNLDVKVKSINGGFTSFLRRKWKFKKERNKGYKHHAEDALIIANADFIFKEWKKLDKAKKVMENQMFEEKQAESMPEIETEQEYKEIFITPHQIKHIKDFKDYKYSHRVDKKPNRKLINDTLYSTRKDDKGNTLIVNNLNGLYDKDNDKLKKLINKSPEKLLMYHHDPQTYQKLKLIMEQYGDEKNPLYKYYEETGNYLTKYSKKDNGPVIKKIKYYGNKLNAHLDITDDYPNSRNKVVKLSLKPYRFDVYLDNGVYKFVTVKNLDVIKKENYYEVNSKCYEEAKKLKKISNQAEFIASFYKNDLIKINGELYRVIGVNNSTRNIVELNMIDITYREYLENMNDKRPPHIIKTIASKTQSIKKYSTDILGNLYEVKSKKHPQIIKKG

SEQ ID NO: 9015 - protein, 1053 aa, Staphylococcus aureus
MKRNYILGLDIGITSVGYGIIDYETRDVIDAGVRLFKEANVENNEGRRSKRGARRLKRRRRHRIQRVKKLLFDYNLLTDHSELSGINPYEARVKGLSQKLSEEEFSAALLHLAKRRGVHNVNEVEEDTGNELSTKEQISRNSKALEEKYVAELQLERLKKDGEVRGSINRFKTSDYVKEAKQLLKVQKAYHQLDQSFIDTYIDLLETRRTYYEGPGEGSPFGWKDIKEWYEMLMGHCTYFPEELRSVKYAYNADLYNALNDLNNLVITRDENEKLEYYEKFQIIENVFKQKKKPTLKQIAKEILVNEEDIKGYRVTSTGKPEFTNLKVYHDIKDITARKEIIENAELLDQIAKILTIYQSSEDIQEELTNLNSELTQEEIEQISNLKGYTGTHNLSLKAINLILDELWHTNDNQIAIFNRLKLVPKKVDLSQQKEIPTTLVDDFILSPVVKRSFIQSIKVINAIIKKYGLPNDIIIELAREKNSKDAQKMINEMQKRNRQTNERIEEIIRTTGKENAKYLIEKIKLHDMQEGKCLYSLEAIPLEDLLNNPFNYEVDHIIPRSVSFDNSFNNKVLVKQEENSKKGNRTPFQYLSSSDSKISYETFKKHILNLAKGKGRISKTKKEYLLEERDINRFSVQKDFINRNLVDTRYATRGLMNLLRSYFRVNNLDVKVKSINGGFTSFLRRKWKFKKERNKGYKHHAEDALIIANADFIFKEWKKLDKAKKVMENQMFEEKQAESMPEIETEQEYKEIFITPHQIKHIKDFKDYKYSHRVDKKPNRKLINDTLYSTRKDDKGNTLIVNNLNGLYDKDNDKLKKLINKSPEKLLMYHHDPQTYQKLKLIMEQYGDEKNPLYKYYEETGNYLTKYSKKDNGPVIKKIKYYGNKLNAHLDITDDYPNSRNKVVKLSLKPYRFDVYLDNGVYKFVTVKNLDVIKKENYYEVNSKCYEEAKKLKKISNQAEFIASFYKNDLIKINGELYRVIGVNSDDRNIIELNMIDITYREYLENMNDKRPPHIIKTIASKTQSIKKYSTDILGNLYEVKSKKHPQIIKKG

SEQ ID NO: 9016 - protein, 1053 aa, Staphylococcus aureus
MKRNYILGLDIGITSVGYGIIDYETRDVIDAGVRLFKEANVENNEGRRSKRGARRLKRRRRHRIQRVKKLLFDYNLLTDHSELSGINPYEARVKGLSQKLSEEEFSAALLHLAKRRGVHNVNEVEEDTGNELSTKEQISRNSKALEEKYVAELQLERLKKDGEVRGSINRFKTSDYVKEAKQLLKVQKAYHQLDQSFIDTYIDLLETRRTYYEGPGEGSPFGWKDIKEWYEMLMGHCTYFPEELRSVKYAYNADLYNALNDLNNLVITRDENEKLEYYEKFQIIENVFKQKKKPTLKQIAKEILVNEEDIKGYRVTSTGKPEFTNLKVYHDIKDITARKEIIENAELLDQIAKILTIYQSSEDIQEELTNLNSELTQEEIEQISNLKGYTGTHNLSLKAINLILDELWHTNDNQIAIFNRLKLVPKKVDLSQQKEIPTTLVDDFILSPVVKRSFIQSIKVINAIIKKYGLPNDIIIELAREKNSKDAQKMINEMQKRNRQTNERIEEIIRTTGKENAKYLIEKIKLHDMQEGKCLYSLEAIPLEDLLNNPFNYEVDHIIPRSVSFDNSFNNKVLVKQEENSKKGNRTPFQYLSSSDSKISYETFKKHILNLAKGKGRISKTKKEYLLEERDINRFSVQKDFINRNLVDTRYATRGLMNLLRSYFRVNNLDVKVKSINGGFTSFLRRKWKFKKERNKGYKHHAEDALIIANADFIFKEWKKLDKAKKVMENQMFEEKQAESMPEIETEQEYKEIFITPHQIKHIKDFKDYKYSHRVDKKPNRKLINDTLYSTRKDDKGNTLIVNNLNGLYDKDNDKLKKLINKSPEKLLMYHHDPQTYQKLKLIMEQYGDEKNPLYKYYEETGNYLTKYSKKDNGPVIKKIKYYGNKLNAHLDITDDYPNSRNKVVKLSLKPYRFDVYLDNGVYKFVTVKNLDVIKKENYYEVNSKCYEEAKKLKKISNQAEFIASFYKNDLIKINGELYRVIGVNNNRLNKIELNMIDITYREYLENMNDKRPPHIIKTIASKTQSIKKYSTDILGNLYEVKSKKHPQIIKKG

SEQ ID NO: 9017 - protein, 1084 aa, Corynebacterium diphtheriae
MKYHVGIDVGTFSVGLAAIEVDDAGMPIKTLSLVSHIHDSGLDPDEIKSAVTRLASSGIARRTRRLYRRKRRRLQQLDKFIQRQGWPVIELEDYSDPLYPWKVRAELAASYIADEKERGEKLSVALRHIARHRGWRNPYAKVSSLYLPDGPSDAFKAIREEIKRASGQPVPETATVGQMVTLCELGTLKLRGEGGVLSARLQQSDYAREIQEICRMQEIGQELYRKIIDVVFAAESPKGSASSRVGKDPLQPGKNRALKASDAFQRYRIAALIGNLRVRVDGEKRILSVEEKNLVFDHLVNLTPKKEPEWVTIAEILGIDRGQLIGTATMTDDGERAGARPPTHDTNRSIVNSRIAPLVDWWKTASALEQHAMVKALSNAEVDDFDSPEGAKVQAFFADLDDDVHAKLDSLHLPVGRAAYSEDTLVRLTRRMLSDGVDLYTARLQEFGIEPSWTPPTPRIGEPVGNPAVDRVLKTVSRWLESATKTWGAPERVIIEHVREGFVTEKRAREMDGDMRRRAARNAKLFQEMQEKLNVQGKPSRADLWRYQSVQRQNCQCAYCGSPITFSNSEMDHIVPRAGQGSTNTRENLVAVCHRCNQSKGNTPFAIWAKNTSIEGVSVKEAVERTRHWVTDTGMRSTDFKKFTKAVVERFQRATMDEEIDARSMESVAWMANELRSRVAQHFASHGTTVRVYRGSLTAEARRASGISGKLKFFDGVGKSRLDRRHHAIDAAVIAFTSDYVAETLAVRSNLKQSQAHRQEAPQWREFTGKDAEHRAAWRVWCQKMEKLSALLTEDLRDDRVVVMSNVRLRLGNGSAHKETIGKLSKVKLSSQLSVSDIDKASSEALWCALTREPGFDPKEGLPANPERHIRVNGTHVYAGDNIGLFPVSAGSIALRGGYAELGSSFHHARVYKITSGKKPAFAMLRVYTIDLLPYRNQDLFSVELKPQTMSMRQAEKKLRDALATGNAEYLGWLVVDDELVVDTSKIATDQVKAVEAELGTIRRWRVDGFFSPSKLRLRPLQMSKEGIKKESAPELSKIIDRPGWLPAVNKLFSDGNVTVVRRDSLGRVRLESTAHLPVTWKVQ

SEQ ID NO: 9018 - protein, 984 aa, Campylobacter jejuni
MARILAFDIGISSIGWAFSENDELKDCGVRIFTKVENPKTGESLALPRRLARSARKRLARRKARLNHLKHLIANEFKLNYEDYQSFDESLAKAYKGSLISPYELRFRALNELLSKQDFARVILHIAKRRGYDDIKNSDDKEKGAILKAIKQNEEKLANYQSVGEYLYKEYFQKFKENSKEFTNVRNKKESYERCIAQSFLKDELKLIFKKQREFGFSFSKKFEEEVLSVAFYKRALKDFSHLVGNCSFFTDEKRAPKNSPLAFMFVALTRIINLLNNLKNTEGILYTKDDLNALLNEVLKNGTLTYKQTKKLLGLSDDYEFKGEKGTYFIEFKKYKEFIKALGEHNLSQDDLNEIAKDITLIKDEIKLKKALAKYDLNQNQIDSLSKLEFKDHLNISFKALKLVTPLMLEGKKYDEACNELNLKVAINEDKKDFLPAFNETYYKDEVTNPVVLRAIKEYRKVLNALLKKYGKVHKINIELAREVGKNHSQRAKIEKEQNENYKAKKDAELECEKLGLKINSKNILKLRLFKEQKEFCAYSGEKIKISDLQDEKMLEIDHIYPYSRSFDDSYMNKVLVFTKQNQEKLNQTPFEAFGNDSAKWQKIEVLAKNLPTKKQKRILDKNYKDKEQKNFKDRNLNDTRYIARLVLNYTKDYLDFLPLSDDENTKLNDTQKGSKVHVEAKSGMLTSALRHTWGFSAKDRNNHLHHAIDAVIIAYANNSIVKAFSDFKKEQESNSAELYAKKISELDYKNKRKFFEPFSGFRQKVLDKIDEIFVSKPERKKPSGALHEETFRKEEEFYQSYGGKEGVLKALELGKIRKVNGKIVKNGDMFRVDIFKHKKTNKFYAVPIYTMDFALKVLPNKAVARSKKGEIKDWILMDENYEFCFSLYKDSLILIQTKDMQEPEFVYYNAFTSSTVSLIVSKHDNKFETLSKNQKILFKNANEKEVIAKSIGIQNLKVFEKYIVSALGEVTKAEFRQREDFKK

SEQ ID NO: 9019 - protein, 1087 aa, Geobacillus stearothermophilus
MRYKIGLDIGITSVGWAVMNLDIPRIEDLGVRIFDRAENPQTGESLALPRRLARSARRRLRRRKHRLERIRRLVIREGILTKEELDKLFEEKHEIDVWQLRVEALDRKLNNDELARVLLHLAKRRGFKSNRKSERSNKENSTMLKHIEENRAILSSYRTVGEMIVKDPKFALHKRNKGENYTNTIARDDLEREIRLIFSKQREFGNMSCTEEFENEYITIWASQRPVASKDDIEKKVGFCTFEPKEKRAPKATYTFQSFIAWEHINKLRLISPSGARGLTDEERRLLYEQAFQKNKITYHDIRTLLHLPDDTYFKGIVYDRGESRKQNENIRFLELDAYHQIRKAVDKVYGKGKSSSFLPIDFDTFGYALTLFKDDADIHSYLRNEYEQNGKRMPNLANKVYDNELIEELLNLSFTKFGHLSLKALRSILPYMEQGEVYSSACERAGYTFTGPKKKQKTMLLPNIPPIANPVVMRALTQARKVVNAIIKKYGSPVSIHIELARDLSQTFDERRKTKKEQDENRKKNETAIRQLMEYGLTLNPTGHDIVKFKLWSEQNGRCAYSLQPIEIERLLEPGYVEVDHVIPYSRSLDDSYTNKVLVLTRENREKGNRIPAEYLGVGTERWQQFETFVLTNKQFSKKKRDRLLRLHYDENEETEFKNRNLNDTRYISRFFANFIREHLKFAESDDKQKVYTVNGRVTAHLRSRWEFNKNREESDLHHAVDAVIVACTTPSDIAKVTAFYQRREQNKELAKKTEPHFPQPWPHFADELRARLSKHPKESIKALNLGNYDDQKLESLQPVFVSRMPKRSVTGAAHQETLRRYVGIDERSGKIQTVVKTKLSEIKLDASGHFPMYGKESDPRTYEAIRQRLLEHNNDPKKAFQEPLYKPKKNGEPGPVIRTVKIIDTKNQVIPLNDGKTVAYNSNIVRVDVFEKDGKYYCVPVYTMDIMKGILPNKAIEPNKPYSEWKEMTEDYTFRFSLYPNDLIRIELPREKTVKTAAGEEINVKDVFVYYKTIDSANGGLELISHDHRFSLRGVGSRTLKRFEKYQVDVLGNIYKVRGEKRVGLASSAHSKPGKTIRPLQSTRD

SEQ ID NO: 9020 - protein, 1378 aa, Streptococcus sp.
MDKKYSIGLDIGTNSVGWAVITDEYKVPSKKFKVLGNTDRHSIKKNLIGALLFDSGETAEATRLKRTARRRYTRRKNRICYLQEIFSNEMAKVDDSFFHRLEESFLVEEDKKHERHPIFGNIVDEVAYHEKYPTIYHLRKKLVDSTDKADLRLIYLALAHMIKFRGHFLIEGDLNPDNSDVDKLFIQLVQTYNQLFEENPINASGVDAKAILSARLSKSRKLENLIAQLPGEKKNGLFGNLIALSLGLTPNFKSNFDLAEDAKLQLSKDTYDDDLDNLLAQIGDQYADLFLAAKNLSDAILLSDILRVNTEITKAPLSASMIKRYDEHHQDLTLLKALVRQQLPEKYKEIFFDQSKNGYAGYIDGGASQEEFYKFIKPILEKMDGTEELLVKLKREDLLRKQRTFDNGSIPHQIHLGELHAILRRQEDFYPFLKDNREKIEKILTFRIPYYVGPLARGNSRFAWMTRKSEETITPWNFEEVVDKGASAQSFIERMTNFDKNLPNEKVLPKHSLLYEYFTVYNELTKVKYVTEGMRKPAFLSGEQKKAIVDLLFKTNRKVTVKQLKEDYFKKIECFDSVEISGVEDRFNASLGTYHDLLKIIKDKDFLDNEENEDILEDIVLTLTLFEDREMIEERLKTYAHLFDDKVMKQLKRRRYTGWGRLSRKLINGIRDKQSGKTILDFLKSDGFANRNFMQLIHDDSLTFKEDIQKAQVSGQGDSLHEHIANLAGSPAIKKGILQTVKVVDELVKVMGRHKPENIVIEMARENQTTQKGQKNSRERMKRIEEGIKELGSQILKEHPVENTQLQNEKLYLYYLQNGRDMYVDQELDINRLSDYDVDHIVPQSFLKDDSIDNKVLTRSDKNRGKSDNVPSEEVVKKMKNYWRQLLNAKLITQRKFDNLTKAERGGLSELDKAGFIKRQLVETRQITKHVAQILDSRMNTKYDENDKLIREVKVITLKSKLVSDFRKDFQFYKVREINNYHHAHDAYLNAVVGTALIKKYPKLESEFVYGDYKVYDVRKMIAKSEQEIGKATAKYFFYSNIMNFFKTEITLANGEIRKRPLIETNGETGEIVWDKGRDFATVRKVLSMPQVNIVKKTEIQTVGQNGGLFDDNPKSPLEVTPSKLVPLKKELNPKKYGGYQKPTTAYPVLLITDTKQLIPISVMNKKQFEQNPVKFLRDRGYQQVGKNDFIKLPKYTLVDIGDGIKRLWASSKEIHKGNQLVVSKKSQILLYHAHHLDSDLSNDYLQNHNQQFDVLFNEIISFSKKCKLGKEHIQKIENVYSNKKNSASIEELAESFIKLLGFTQLGATSPFNFLGVKLNQKQYKGKKDYILPCTEGTLIRQSITGLYETRVDLSKIGEDSGGSGGSKRTADGSEFES

SEQ ID NO: 9021 - protein, 1082 aa, Neisseria meningitidis
MAAFKPNSINYILGLDIGIASVGWAMVEIDEEENPIRLIDLGVRVFERAEVPKTGDSLAMARRLARSVRRLTRRRAHRLLRTRRLLKREGVLQAANFDENGLIKSLPNTPWQLRAAALDRKLTPLEWSAVLLHLIKHRGYLSQRKNEGETADKELGALLKGVAGNAHALQTGDFRTPAELALNKFEKESGHIRNQRSDYSHTFSRKDLQAELILLFEKQKEFGNPHVSGGLKEGIETLLMTQRPALSGDAVQKMLGHCTFEPAEPKAAKNTYTAERFIWLTKLNNLRILEQGSERPLTDTERATLMDEPYRKSKLTYAQARKLLGLEDTAFFKGLRYGKDNAEASTLMEMKAYHAISRALEKEGLKDKKSPLNLSPELQDEIGTAFSLFKTDEDITGRLKDRIQPEILEALLKHISFDKFVQISLKALRRIVPLMEQGKRYDEACAEIYGDHYGKKNTEEKIYLPPIPADEIRNPVVLRALSQARKVINGVVRRYGSPARIHIETAREVGKSFKDRKEIEKRQEENRKDREKAAAKFREYFPNFVGEPKSKDILKLRLYEQQHGKCLYSGKEINLGRLNEKGYVEIDHALPFSRTWDDSFNNKVLVLGSENQNKGNQTPYEYFNGKDNSREWQEFKARVETSRFPRSKKQRILLQKFDEDGFKERNLNDTRYVNRFLCQFVADRMRLTGKGKKRVFASNGQITNLLRGFWGLRKVRAENDRHHALDAVVVACSTVAMQQKITRFVRYKEMNAFDGKTIDKETGEVLHQKTHFPQPWEFFAQEVMIRVFGKPDGKPEFEEADTLEKLRTLLAEKLSSRPEAVHEYVTPLFVSRAPNRKMSGQGHMETVKSAKRLDEGVSVLRVPLTQLKLKDLEKMVNREREPKLYEALKARLEAHKDDPAKAFAEPFYKYDKAGNRTQQVKAVRVEQVQKTGVWVRNHNGIADNATMVRVDVFEKGDKYYLVPIYSWQVAKGILPDRAVVQGKDEEDWQLIDDSFNFKFSLHPNDLVEVITKKARMFGYFASCHRGTGNINIRIHDLDHKIGKNGILEGIGVKTALSFQKYQIDELGKEIRPCRLKKRPPVR

SEQ ID NO: 9022 - protein, 1375 aa, Streptococcus canis
MEKKYSIGLDIGTNSVGWAVITDDYKVPSKKFKVLGNTNRKSIKKNLMGALLFDSGETAEATRLKRTARRRYTRRKNRIRYLQEIFANEMAKLDDSFFQRLEESFLVEEDKKNERHPIFGNLADEVAYHRNYPTIYHLRKKLADSPEKADLRLIYLALAHIIKFRGHFLIEGKLNAENSDVAKLFYQLIQTYNQLFEESPLDEIEVDAKGILSARLSKSKRLEKLIAVFPNEKKNGLFGNIIALALGLTPNFKSNFDLTEDAKLQLSKDTYDDDLDELLGQIGDQYADLFSAAKNLSDAILLSDILRSNSEVTKAPLSASMVKRYDEHHQDLALLKTLVRQQFPEKYAEIFKDDTKNGYAGYVGIGIKHRKRTTKLATQEEFYKFIKPILEKMDGAEELLAKLNRDDLLRKQRTFDNGSIPHQIHLKELHAILRRQEEFYPFLKENREKIEKILTFRIPYYVGPLARGNSRFAWLTRKSEEAITPWNFEEVVDKGASAQSFIERMTNFDEQLPNKKVLPKHSLLYEYFTVYNELTKVKYVTERMRKPEFLSGEQKKAIVDLLFKTNRKVTVKQLKEDYFKKIECFDSVEIIGVEDRFNASLGTYHDLLKIIKDKDFLDNEENEDILEDIVLTLTLFEDREMIEERLKTYAHLFDDKVMKQLKRRHYTGWGRLSRKMINGIRDKQSGKTILDFLKSDGFSNRNFMQLIHDDSLTFKEEIEKAQVSGQGDSLHEQIADLAGSPAIKKGILQTVKIVDELVKVMGHKPENIVIEMARENQTTTKGLQQSRERKKRIEEGIKELESQILKENPVENTQLQNEKLYLYYLQNGRDMYVDQELDINRLSDYDVDHIVPQSFIKDDSIDNKVLTRSVENRGKSDNVPSEEVVKKMKNYWRQLLNAKLITQRKFDNLTKAERGGLSEADKAGFIKRQLVETRQITKHVARILDSRMNTKRDKNDKPIREVKVITLKSKLVSDFRKDFQLYKVRDINNYHHAHDAYLNAVVGTALIKKYPKLESEFVYGDYKVYDVRKMIAKSEQEIGKATAKRFFYSNIMNFFKTEVKLANGEIRKRPLIETNGETGEVVWNKEKDFATVRKVLAMPQVNIVKKTEVQTGGFSKESILSKRESAKLIPRKKGWDTRKYGGFGSPTVAYSILVVAKVEKGKAKKLKSVKVLVGITIMEKGSYEKDPIGFLEAKGYKDIKKELIFKLPKYSLFELENGRRRMLASATELQKANELVLPQHLVRLLYYTQNISATTGSNNLGYIEQHREEFKEIFEKIIDFSEKYILKNKVNSNLKSSFDEQFAVSDSILLSNSFVSLLKYTSFGASGGFTFLDLDVKQGRLRYQTVTEVLDATLIYQSITGLYETRTDLSQLGGD

SEQ ID NO: 9023 - protein, 1375 aa, Streptococcus canis
MEKKYSIGLDIGTNSVGWAVITDDYKVPSKKFKVLGNTNRKSIKKNLMGALLFDSGETAEATRLKRTARRRYTRRKNRIRYLQEIFANEMAKLDDSFFQRLEESFLVEEDKKNERHPIFGNLADEVAYHRNYPTIYHLRKKLADSPEKADLRLIYLALAHIIKFRGHFLIEGKLNAENSDVAKLFYQLIQTYNQLFEESPLDEIEVDAKGILSARLSKSKRLEKLIAVFPNEKKNGLFGNIIALALGLTPNFKSNFDLTEDAKLQLSKDTYDDDLDELLGQIGDQYADLFSAAKNLSDAILLSDILRSNSEVTKAPLSASMVKRYDEHHQDLALLKTLVRQQFPEKYAEIFKDDTKNGYAGYVGADKKLRKRSGKLATEEEFYKFIKPILEKMDGAEELLAKLNRDDLLRKQRTFDNGSIPHQIHLKELHAILRRQEEFYPFLKENREKIEKILTFRIPYYVGPLARGNSRFAWLTRKSEEAITPWNFEEVVDKGASAQSFIERMTNFDEQLPNKKVLPKHSLLYEYFTVYNELTKVKYVTERMRKPEFLSGEQKKAIVDLLFKTNRKVTVKQLKEDYFKKIECFDSVEIIGVEDRFNASLGTYHDLLKIIKDKDFLDNEENEDILEDIVLTLTLFEDREMIEERLKTYAHLFDDKVMKQLKRRHYTGWGRLSRKMINGIRDKQSGKTILDFLKSDGFSNANFMQLIHDDSLTFKEEIEKAQVSGQGDSLHEQIADLAGSPAIKKGILQTVKIVDELVKVMGHKPENIVIEMARENQTTTKGLQQSRERKKRIEEGIKELESQILKENPVENTQLQNEKLYLYYLQNGRDMYVDQELDINRLSDYDVDHIVPQSFIKDDSIDNKVLTRSVENRGKSDNVPSEEVVKKMKNYWRQLLNAKLITQRKFDNLTKAERGGLSEADKAGFIKRQLVETRQITKHVARILDSRMNTKRDKNDKPIREVKVITLKSKLVSDFRKDFQLYKVRDINNYHHAHDAYLNAVVGTALIKKYPKLESEFVYGDYKVYDVRKMIAKSEQEIGKATAKRFFYSNIMNFFKTEVKLANGEIRKRPLIETNGETGEVVWNKEKDFATVRKVLAMPQVNIVKKTEVQTGGFSKESILSKRESAKLIPRKKGWDTRKYGGFGSPTVAYSILVVAKVEKGKAKKLKSVKVLVGITIMEKGSYEKDPIGFLEAKGYKDIKKELIFKLPKYSLFELENGRRRMLASAKELQKANELVLPQHLVRLLYYTQNISATTGSNNLGYIEQHREEFKEIFEKIIDFSEKYILKNKVNSNLKSSFDEQFAVSDSILLSNSFVSLLKYTSFGASGGFTFLDLDVKQGRLRYQTVTEVLDATLIYQSITGLYETRTDLSQLGGD

SEQ ID NO: 9024 - protein, 1368 aa, Streptococcus pyogenes
MDKKYSIGLDIGTNSVGWAVITDEYKVPSKKFKVLGNTDRHSIKKNLIGALLFDSGETAEATRLKRTARRRYTRRKNRICYLQEIFSNEMAKVDDSFFHRLEESFLVEEDKKHERHPIFGNIVDEVAYHEKYPTIYHLRKKLVDSTDKADLRLIYLALAHMIKFRGHFLIEGDLNPDNSDVDKLFIQLVQTYNQLFEENPINASGVDAKAILSARLSKSRRLENLIAQLPGEKKNGLFGNLIALSLGLTPNFKSNFDLAEDAKLQLSKDTYDDDLDNLLAQIGDQYADLFLAAKNLSDAILLSDILRVNTEITKAPLSASMVKRYDEHHQDLTLLKALVRQQLPEKYKEIFFDQSKNGYAGYIDGGASQEEFYKFIKPILEKMDGTEELLVKLNREDLLRKQRTFDNGIIPHQIHLGELHAILRRQGDFYPFLKDNREKIEKILTFRIPYYVGPLARGNSRFAWMTRKSEETITPWNFEEVVDKGASAQSFIERMTNFDKNLPNEKVLPKHSLLYEYFTVYNELTKVKYVTEGMRKPAFLSGEQKKAIVDLLFKTNRKVTVKQLKEDYFKKIECFDSVEISGVEDRFNASLGTYHDLLKIIKDKDFLDNEENEDILEDIVLTLTLFEDREMIEERLKTYAHLFDDKVMKQLKRLRYTGWGRLSRKLINGIRDKQSGKTILDFLKSDGFANRNFMQLIHDDSLTFKEDIQKAQVSGQGDSLHEHIANLAGSPAIKKGILQTVKVVDELVKVMGGHKPENIVIEMARENQTTQKGQKNSRERMKRIEEGIKELGSQILKEHPVENTQLQNEKLYLYYLQNGRDMYVDQELDINRLSDYDVDHIVPQSFLKDDSIDNKVLTRSDKNRGKSDNVPSEEVVKKMKNYWRQLLNAKLITQRKFDNLTKAERGGLSELDKAGFIKRQLVETRQITKHVAQILDSRMNTKYDENDKLIREVKVITLKSKLVSDFRKDFQFYKVREINNYHHAHDAYLNAVVGTALIKKYPKLESEFVYGDYKVYDVRKMIAKSEQEIGKATAKYFFYSNIMNFFKTEITLANGEIRKRPLIETNGETGEIVWDKGRDFATVRKVLSMPQVNIVKKTEVQTGGFSKESILPKGNSDKLIARKKDWDPKKYGGFNSPTAAYSVLVVAKVEKGKSKKLKSVKELLGITIMERSSFEKNPIGFLEAKGYKEVKKDLIIKLPKYSLFELENGRKRMLASAGVLHKGNELALPSKYVNFLYLASHYEKLKGSPEDNEQKQLFVEQHKHYLDEIIEQISEFSKRVILADANLDKVLSAYNKHRDKPIREQAENIIHLFTLTNLGVPAAFKYFDTTIDKKRYTSTKEVLDATLIHQSITGLYETRIDLSQLGGD

SEQ ID NO: 9025 - protein, 1368 aa, Streptococcus pyogenes
MDKKYSIGLDIGTNSVGWAVITDEYKVPSKKFKVLGNTDRHSIKKNLIGALLFDSGETAEATRLKRTARRRYTRRKNRICYLQEIFSNEMAKVDDSFFHRLEESFLVEEDKKHERHPIFGNIVDEVAYHEKYPTIYHLRKKLVDSTDKADLRLIYLALAHMIKFRGHFLIEGDLNPDNSDVDKLFIQLVQTYNQLFEENPINASGVDAKAILSARLSKSRRLENLIAQLPGEKKNGLFGNLIALSLGLTPNFKSNFDLAEDAKLQLSKDTYDDDLDNLLAQIGDQYADLFLAAKNLSDAILLSDILRVNTEITKAPLSASMVKRYDEHHQDLTLLKALVRQQLPEKYKEIFFDQSKNGYAGYIDGGASQEEFYKFIKPILEKMDGTEELLVKLNREDLLRKQRTFDNGIIPHQIHLGELHAILRRQGDFYPFLKDNREKIEKILTFRIPYYVGPLARGNSRFAWMTRKSEETITPWNFEEVVDKGASAQSFIERMTNFDKNLPNEKVLPKHSLLYEYFTVYNELTKVKYVTEGMRKPAFLSGEQKKAIVDLLFKTNRKVTVKQLKEDYFKKIECFDSVEISGVEDRFNASLGTYHDLLKIIKDKDFLDNEENEDILEDIVLTLTLFEDREMIEERLKTYAHLFDDKVMKQLKRLRYTGWGRLSRKLINGIRDKQSGKTILDFLKSDGFANRNFMQLIHDDSLTFKEDIQKAQVSGQGDSLHEHIANLAGSPAIKKGILQTVKVVDELVKVMGGHKPENIVIEMARENQTTQKGQKNSRERMKRIEEGIKELGSQILKEHPVENTQLQNEKLYLYYLQNGRDMYVDQELDINRLSDYDVDHIVPQSFLKDDSIDNKVLTRSDKNRGKSDNVPSEEVVKKMKNYWRQLLNAKLITQRKFDNLTKAERGGLSELDKAGFIKRQLVETRQITKHVAQILDSRMNTKYDENDKLIREVKVITLKSKLVSDFRKDFQFYKVREINNYHHAHDAYLNAVVGTALIKKYPKLESEFVYGDYKVYDVRKMIAKSEQEIGKATAKYFFYSNIMNFFKTEITLANGEIRKRPLIETNGETGEIVWDKGRDFATVRKVLSMPQVNIVKKTEVQTGGFSKESILPKGNSDKLIARKKDWDPKKYGGFNSPTVAYSVLVVAKVEKGKSKKLKSVKELLGITIMERSSFEKNPIGFLEAKGYKEVKKDLIIKLPKYSLFELENGRKRMLASASVLHKGNELALPSKYVNFLYLASHYEKLKGSSEDNKQKQLFVEQHKHYLDEIIEQISEFSKRVILADANLDKVLSAYNKHRDKPIREQAENIIHLFTLTNLGASAAFKYFDTTIGRKLYTSTKEVLDATLIHQSITGLYETRIDLSQLGGD

SEQ ID NO: 9026 - protein, 1368 aa, Streptococcus pyogenes
MDKKYSIGLDIGTNSVGWAVITDEYKVPSKKFKVLGNTDRHSIKKNLIGALLFDSGETAEATRLKRTARRRYTRRKNRICYLQEIFSNEMAKVDDSFFHRLEESFLVEEDKKHERHPIFGNIVDEVAYHEKYPTIYHLRKKLVDSTDKADLRLIYLALAHMIKFRGHFLIEGDLNPDNSDVDKLFIQLVQTYNQLFEENPINASGVDAKAILSARLSKSRRLENLIAQLPGEKKNGLFGNLIALSLGLTPNFKSNFDLAEDAKLQLSKDTYDDDLDNLLAQIGDQYADLFLAAKNLSDAILLSDILRVNTEITKAPLSASMVKRYDEHHQDLTLLKALVRQQLPEKYKEIFFDQSKNGYAGYIDGGASQEEFYKFIKPILEKMDGTEELLVKLNREDLLRKQRTFDNGIIPHQIHLGELHAILRRQGDFYPFLKDNREKIEKILTFRIPYYVGPLARGNSRFAWMTRKSEETITPWNFEEVVDKGASAQSFIERMTNFDKNLPNEKVLPKHSLLYEYFTVYNELTKVKYVTEGMRKPAFLSGEQKKAIVDLLFKTNRKVTVKQLKEDYFKKIECFDSVEISGVEDRFNASLGTYHDLLKIIKDKDFLDNEENEDILEDIVLTLTLFEDREMIEERLKTYAHLFDDKVMKQLKRLRYTGWGRLSRKLINGIRDKQSGKTILDFLKSDGFANRNFMQLIHDDSLTFKEDIQKAQVSGQGDSLHEHIANLAGSPAIKKGILQTVKVVDELVKVMGGHKPENIVIEMARENQTTQKGQKNSRERMKRIEEGIKELGSQILKEHPVENTQLQNEKLYLYYLQNGRDMYVDQELDINRLSDYDVDHIVPQSFLKDDSIDNKVLTRSDKNRGKSDNVPSEEVVKKMKNYWRQLLNAKLITQRKFDNLTKAERGGLSELDKAGFIKRQLVETRQITKHVAQILDSRMNTKYDENDKLIREVKVITLKSKLVSDFRKDFQFYKVREINNYHHAHDAYLNAVVGTALIKKYPKLESEFVYGDYKVYDVRKMIAKSEQEIGKATAKYFFYSNIMNFFKTEITLANGEIRKRPLIETNGETGEIVWDKGRDFATVRKVLSMPQVNIVKKTEVQTGGFSKESILPKGNSDKLIARKKDWDPKKYGGFNSPTVAYSVLVVAKVEKGKSKKLKSVKELLGITIMERSSFEKNPIDFLEAKGYKEVKKDLIIKLPKYSLFELENGRKRMLASAGVLQKGNELALPSKYVNFLYLASHYEKLKGSPEDNEQKQLFVEQHKHYLDEIIEQISEFSKRVILADANLDKVLSAYNKHRDKPIREQAENIIHLFTLTNLGAPAAFKYFDTTINRKQYNTTKEVLDATLIRQSITGLYETRIDLSQLGGD

SEQ ID NO: 9027 - protein, 1368 aa, Streptococcus pyogenes [sequence omitted]

SEQ ID NO: 9028 - protein, 1368 aa, Streptococcus pyogenes
MDKKYSIGLDIGTNSVGWAVITDEYKVPSKKFKVLGNTDRHSIKKNLIGALLFDSGETAEATRLKRTARRRYTRRKNRICYLQEIFSNEMAKVDDSFFHRLEESFLVEEDKKHERHPIFGNIVDEVAYHEKYPTIYHLRKKLVDSTDKADLRLIYLALAHMIKFRGHFLIEGDLNPDNSDVDKLFIQLVQTYNQLFEENPINASGVDAKAILSARLSKSRRLENLIAQLPGEKKNGLFGNLIALSLGLTPNFKSNFDLAEDAKLQLSKDTYDDDLDNLLAQIGDQYADLFLAAKNLSDAILLSDILRVNTEITKAPLSASMIKRYDEHHQDLTLLKALVRQQLPEKYKEIFFDQSKNGYAGYIDGGASQEEFYKFIKPILEKMDGTEELLVKLNREDLLRKQRTFDNGSIPHQIHLGELHAILRRQEDFYPFLKDNREKIEKILTFRIPYYVGPLARGNSRFAWMTRKSEETITPWNFEEVVDKGASAQSFIERMTNFDKNLPNEKVLPKHSLLYEYFTVYNELTKVKYVTEGMRKPAFLSGEQKKAIVDLLFKTNRKVTVKQLKEDYFKKIECFDSVEISGVEDRFNASLGTYHDLLKIIKDKDFLDNEENEDILEDIVLTLTLFEDREMIEERLKTYAHLFDDKVMKQLKRRRYTGWGRLSRKLINGIRDKQSGKTILDFLKSDGFANRNFMQLIHDDSLTFKEDIQKAQVSGQGDSLHEHIANLAGSPAIKKGILQTVKVVDELVKVMGRHKPENIVIEMARENQTTQKGQKNSRERMKRIEEGIKELGSQILKEHPVENTQLQNEKLYLYYLQNGRDMYVDQELDINRLSDYDVDHIVPQSFLKDDSIDNKVLTRSDKNRGKSDNVPSEEVVKKMKNYWRQLLNAKLITQRKFDNLTKAERGGLSELDKAGFIKRQLVETRQITKHVAQILDSRMNTKYDENDKLIREVKVITLKSKLVSDFRKDFQFYKVREINNYHHAHDAYLNAVVGTALIKKYPKLESEFVYGDYKVYDVRKMIAKSEQEIGKATAKYFFYSNIMNFFKTEITLANGEIRKRPLIETNGETGEIVWDKGRDFATVRKVLSMPQVNIVKKTEVQTGGFSKESILPKRNSDKLIARKKDWDPKKYGGFDSPTVAYSVLVVAKVEKGKSKKLKSVKELLGITIMERSSFEKNPIDFLEAKGYKEVKKDLIIKLPKYSLFELENGRKRMLASARELQKGNELALPSKYVNFLYLASHYEKLKGSPEDNEQKQLFVEQHKHYLDEIIEQISEFSKRVILADAQLDKVLSAYNKHRDKPIREQAENIIHLFTLTNLGAPAAFKYFDTTFKQKQYRSTKEVLDATLIHQSITGLYETRIDLSQLGGD

SEQ ID NO: 9029 - protein, 1368 aa, Streptococcus pyogenes
MDKKYSIGLDIGTNSVGWAVITDEYKVPSKKFKVLGNTDRHSIKKNLIGALLFDSGETAEATRLKRTARRRYTRRKNRICYLQEIFSNEMAKVDDSFFHRLEESFLVEEDKKHERHPIFGNIVDEVAYHEKYPTIYHLRKKLVDSTDKADLRLIYLALAHMIKFRGHFLIEGDLNPDNSDVDKLFIQLVQTYNQLFEENPINASGVDAKAILSARLSKSRRLENLIAQLPGEKKNGLFGNLIALSLGLTPNFKSNFDLAEDAKLQLSKDTYDDDLDNLLAQIGDQYADLFLAAKNLSDAILLSDILRVNTEITKAPLSASMIKRYDEHHQDLTLLKALVRQQLPEKYKEIFFDQSKNGYAGYIDGGASQEEFYKFIKPILEKMDGTEELLVKLNREDLLRKQRTFDNGSIPHQIHLGELHAILRRQEDFYPFLKDNREKIEKILTFRIPYYVGPLARGNSRFAWMTRKSEETITPWNFEEVVDKGASAQSFIERMTNFDKNLPNEKVLPKHSLLYEYFTVYNELTKVKYVTEGMRKPAFLSGEQKKAIVDLLFKTNRKVTVKQLKEDYFKKIECFDSVEISGVEDRFNASLGTYHDLLKIIKDKDFLDNEENEDILEDIVLTLTLFEDREMIEERLKTYAHLFDDKVMKQLKRRRYTGWGRLSRKLINGIRDKQSGKTILDFLKSDGFANRNFMQLIHDDSLTFKEDIQKAQVSGQGDSLHEHIANLAGSPAIKKGILQTVKVVDELVKVMGRHKPENIVIEMARENQTTQKGQKNSRERMKRIEEGIKELGSQILKEHPVENTQLQNEKLYLYYLQNGRDMYVDQELDINRLSDYDVDHIVPQSFLKDDSIDNKVLTRSDKNRGKSDNVPSEEVVKKMKNYWRQLLNAKLITQRKFDNLTKAERGGLSELDKAGFIKRQLVETRQITKHVAQILDSRMNTKYDENDKLIREVKVITLKSKLVSDFRKDFQFYKVREINNYHHAHDAYLNAVVGTALIKKYPKLESEFVYGDYKVYDVRKMIAKSEQEIGKATAKYFFYSNIMNFFKTEITLANGEIRKRPLIETNGETGEIVWDKGRDFATVRKVLSMPQVNIVKKTEVQTGGFSKESILPKRNSDKLIARKKDWDPKKYGGFLWPTVAYSVLVVAKVEKGKSKKLKSVKELLGITIMERSSFEKNPIDFLEAKGYKEVKKDLIIKLPKYSLFELENGRKRMLASAKQLQKGNELALPSKYVNFLYLASHYEKLKGSPEDNEQKQLFVEQHKHYLDEIIEQISEFSKRVILADANLDKVLSAYNKHRDKPIREQAENIIHLFTLTNLGAPAAFKYFDTTIDRKQYRSTKEVLDATLIHQSITGLYETRIDLSQLGGD

SEQ ID NO: 9030 - protein, 1368 aa, Streptococcus pyogenes
MDKKYSIGLDIGTNSVGWAVITDEYKVPSKKFKVLGNTDRHSIKKNLIGALLFDSGETAEATRLKRTARRRYTRRKNRICYLQEIFSNEMAKVDDSFFHRLEESFLVEEDKKHERHPIFGNIVDEVAYHEKYPTIYHLRKKLVDSTDKADLRLIYLALAHMIKFRGHFLIEGDLNPDNSDVDKLFIQLVQTYNQLFEENPINASGVDAKAILSARLSKSRRLENLIAQLPGEKKNGLFGNLIALSLGLTPNFKSNFDLAEDAKLQLSKDTYDDDLDNLLAQIGDQYADLFLAAKNLSDAILLSDILRVNTEITKAPLSASMIKRYDEHHQDLTLLKALVRQQLPEKYKEIFFDQSKNGYAGYIDGGASQEEFYKFIKPILEKMDGTEELLVKLNREDLLRKQRTFDNGSIPHQIHLGELHAILRRQEDFYPFLKDNREKIEKILTFRIPYYVGPLARGNSRFAWMTRKSEETITPWNFEEVVDKGASAQSFIERMTNFDKNLPNEKVLPKHSLLYEYFTVYNELTKVKYVTEGMRKPAFLSGEQKKAIVDLLFKTNRKVTVKQLKEDYFKKIECFDSVEISGVEDRFNASLGTYHDLLKIIKDKDFLDNEENEDILEDIVLTLTLFEDREMIEERLKTYAHLFDDKVMKQLKRRRYTGWGRLSRKLINGIRDKQSGKTILDFLKSDGFANRNFMQLIHDDSLTFKEDIQKAQVSGQGDSLHEHIANLAGSPAIKKGILQTVKVVDELVKVMGRHKPENIVIEMARENQTTQKGQKNSRERMKRIEEGIKELGSQILKEHPVENTQLQNEKLYLYYLQNGRDMYVDQELDINRLSDYDVDHIVPQSFLKDDSIDNKVLTRSDKNRGKSDNVPSEEVVKKMKNYWRQLLNAKLITQRKFDNLTKAERGGLSELDKAGFIKRQLVETRQITKHVAQILDSRMNTKYDENDKLIREVKVITLKSKLVSDFRKDFQFYKVREINNYHHAHDAYLNAVVGTALIKKYPKLESEFVYGDYKVYDVRKMIAKSEQEIGKATAKYFFYSNIMNFFKTEITLANGEIRKRPLIETNGETGEIVWDKGRDFATVRKVLSMPQVNIVKKTEVQTGGFSKESILPKRNSDKLIARKKDWDPKKYGGFVSPTVAYSVLVVAKVEKGKSKKLKSVKELLGITIMERSSFEKNPIDFLEAKGYKEVKKDLIIKLPKYSLFELENGRKRMLASAGELQKGNELALPSKYVNFLYLASHYEKLKGSPEDNEQKQLFVEQHKHYLDEIIEQISEFSKRVILADANLDKVLSAYNKHRDKPIREQAENIIHLFTLTNLGAPAAFKYFDTTIDRKQYRSTKEVLDATLIHQSITGLYETRIDLSQLGGD

SEQ ID NO: 9031 - protein, 1368 aa, Streptococcus pyogenes
MDKKYSIGLDIGTNSVGWAVITDEYKVPSKKFKVLGNTDRHSIKKNLIGALLFDSGETAEATRLKRTARRRYTRRKNRICYLQEIFSNEMAKVDDSFFHRLEESFLVEEDKKHERHPIFGNIVDEVAYHEKYPTIYHLRKKLVDSTDKADLRLIYLALAHMIKFRGHFLIEGDLNPDNSDVDKLFIQLVQTYNQLFEENPINASGVDAKAILSARLSKSRRLENLIAQLPGEKKNGLFGNLIALSLGLTPNFKSNFDLAEDAKLQLSKDTYDDDLDNLLAQIGDQYADLFLAAKNLSDAILLSDILRVNTEITKAPLSASMIKRYDEHHQDLTLLKALVRQQLPEKYKEIFFDQSKNGYAGYIDGGASQEEFYKFIKPILEKMDGTEELLVKLNREDLLRKQRTFDNGSIPHQIHLGELHAILRRQEDFYPFLKDNREKIEKILTFRIPYYVGPLARGNSRFAWMTRKSEETITPWNFEEVVDKGASAQSFIERMTNFDKNLPNEKVLPKHSLLYEYFTVYNELTKVKYVTEGMRKPAFLSGEQKKAIVDLLFKTNRKVTVKQLKEDYFKKIECFDSVEISGVEDRFNASLGTYHDLLKIIKDKDFLDNEENEDILEDIVLTLTLFEDREMIEERLKTYAHLFDDKVMKQLKRRRYTGWGRLSRKLINGIRDKQSGKTILDFLKSDGFANRNFMQLIHDDSLTFKEDIQKAQVSGQGDSLHEHIANLAGSPAIKKGILQTVKVVDELVKVMGRHKPENIVIEMARENQTTQKGQKNSRERMKRIEEGIKELGSQILKEHPVENTQLQNEKLYLYYLQNGRDMYVDQELDINRLSDYDVDHIVPQSFLKDDSIDNKVLTRSDKNRGKSDNVPSEEVVKKMKNYWRQLLNAKLITQRKFDNLTKAERGGLSELDKAGFIKRQLVETRQITKHVAQILDSRMNTKYDENDKLIREVKVITLKSKLVSDFRKDFQFYKVREINNYHHAHDAYLNAVVGTALIKKYPKLESEFVYGDYKVYDVRKMIAKSEQEIGKATAKYFFYSNIMNFFKTEITLANGEIRKRPLIETNGETGEIVWDKGRDFATVRKVLSMPQVNIVKKTEVQTGGFSKESILPKRNSDKLIARKKDWDPKKYGGFVSPTVAYSVLVVAKVEKGKSKKLKSVKELLGITIMERSSFEKNPIDFLEAKGYKEVKKDLIIKLPKYSLFELENGRKRMLASARELQKGNELALPSKYVNFLYLASHYEKLKGSPEDNEQKQLFVEQHKHYLDEIIEQISEFSKRVILADANLDKVLSAYNKHRDKPIREQAENIIHLFTLTNLGAPAAFKYFDTTIDRKEYRSTKEVLDATLIHQSITGLYETRIDLSQLGGD

SEQ ID NO: 9032 - protein, 1368 aa, Streptococcus pyogenes
MDKKYSIGLDIGTNSVGWAVITDEYKVPSKKFKVLGNTDRHSIKKNLIGALLFDSGETAEATRLKRTARRRYTRRKNRICYLQEIFSNEMAKVDDSFFHRLEESFLVEEDKKHERHPIFGNIVDEVAYHEKYPTIYHLRKKLVDSTDKADLRLIYLALAHMIKFRGHFLIEGDLNPDNSDVDKLFIQLVQTYNQLFEENPINASGVDAKAILSARLSKSRRLENLIAQLPGEKKNGLFGNLIALSLGLTPNFKSNFDLAEDTKLQLSKDTYDDDLDNLLAQIGDQYADLFLAAKNLSDAILLSDILRVNTEITKAPLSASMIKLYDEHHQDLTLLKALVRQQLPEKYKEIFFDQSKNGYAGYIDGGASQEEFYKFIKPILEKMDGTEELLVKLNREDLLRKQRTFDNGIIPHQIHLGELHAILRRQEDFYPFLKDNREKIEKILTFRIPYYVGPLARGNSRFAWMTRKSEETITPWNFEKVVDKGASAQSFIERMTNFDKNLPNEKVLPKHSLLYEYFTVYNELTKVKYVTEGMRKPAFLSGDQKKAIVDLLFKTNRKVTVKQLKEDYFKKIECFDSVEISGVEDRFNASLGTYHDLLKIIKDKDFLDNEENEDILEDIVLTLTLFEDREMIEERLKTYAHLFDDKVMKQLKRRRYTGWGRLSRKLINGIRDKQSGKTILDFLKSDGFANRNFIQLIHDDSLTFKEDIQKAQVSGQGDSLHEHIANLAGSPAIKKGILQTVKVVDELVKVMGRHKPENIVIEMARENQTTQKGQKNSRERMKRIEEGIKELGSQILKEHPVENTQLQNEKLYLYYLQNGRDMYVDQELDINRLSDYDVDHIVPQSFLKDDSIDNKVLTRSDKNRGKSDNVPSEEVVKKMKNYWRQLLNAKLITQRKFDNLTKAERGGLSELDKAGFIKRQLVETRQITKHVAQILDSRMNTKYDENDKLIREVKVITLKSKLVSDFRKDFQFYKVREINNYHHAHDAYLNAVVGTALIKKYPKLESEFVYGDYKVYDVRKMIAKSEQEIGKATAKYFFYSNIMNFFKTEITLANGEIRKRPLIETNGETGEIVWDKGRDFATVRKVLSMPQVNIVKKTEVQTGGFSKESILPKRNSDKLIARKKDWDPKKYGGFDSPTVAYSVLVVAKVEKGKSKKLKSVKELLGITIMERSSFEKNPIDFLEAKGYKEVKKDLIIKLPKYSLFELENGRKRMLASAGVLQKGNELALPSKYVNFLYLASHYEKLKGSPEDNEQKQLFVEQHKHYLDEIIEQISEFSKRVILADANLDKVLSAYNKHRDKPIREQAENIIHLFTLTNLGAPAAFKYFDTTIDRKRYTSTKEVLDATLIHQSITGLYETRIDLSQLGGD

SEQ ID NO: 9033 - protein, 1368 aa, Streptococcus pyogenes
MDKKYSIGLDIGTNSVGWAVITDEYKVPSKKFKVLGNTDRHSIKKNLIGALLFDSGETAEATRLKRTARRRYTRRKNRICYLQEIFSNEMAKVDDSFFHRLEESFLVEEDKKHERHPIFGNIVDEVAYHEKYPTIYHLRKKLVDSTDKADLRLIYLALAHMIKFRGHFLIEGDLNPDNSDVDKLFIQLVQTYNQLFEENPINASGVDAKAILSARLSKSRRLENLIAQLPGEKKNGLFGNLIALSLGLTPNFKSNFDLAEDTKLQLSKDTYDDDLDNLLAQIGDQYADLFLAAKNLSDAILLSDILRVNTEITKAPLSASMIKLYDEHHQDLTLLKALVRQQLPEKYKEIFFDQSKNGYAGYIDGGASQEEFYKFIKPILEKMDGTEELLVKLNREDLLRKQRTFDNGIIPHQIHLGELHAILRRQEDFYPFLKDNREKIEKILTFRIPYYVGPLARGNSRFAWMTRKSEETITPWNFEKVVDKGASAQSFIERMTNFDKNLPNEKVLPKHSLLYEYFTVYNELTKVKYVTEGMRKPAFLSGDQKKAIVDLLFKTNRKVTVKQLKEDYFKKIECFDSVEISGVEDRFNASLGTYHDLLKIIKDKDFLDNEENEDILEDIVLTLTLFEDREMIEERLKTYAHLFDDKVMKQLKRRRYTGWGRLSRKLINGIRDKQSGKTILDFLKSDGFANRNFIQLIHDDSLTFKEDIQKAQVSGQGDSLHEHIANLAGSPAIKKGILQTVKVVDELVKVMGRHKPENIVIEMARENQTTQKGQKNSRERMKRIEEGIKELGSQILKEHPVENTQLQNEKLYLYYLQNGRDMYVDQELDINRLSDYDVDHIVPQSFLKDDSIDNKVLTRSDKNRGKSDNVPSEEVVKKMKNYWRQLLNAKLITQRKFDNLTKAERGGLSELDKAGFIKRQLVETRQITKHVAQILDSRMNTKYDENDKLIREVKVITLKSKLVSDFRKDFQFYKVREINNYHHAHDAYLNAVVGTALIKKYPKLESEFVYGDYKVYDVRKMIAKSEQEIGKATAKYFFYSNIMNFFKTEITLANGEIRKRPLIETNGETGEIVWDKGRDFATVRKVLSMPQVNIVKKTEVQTGGFSKESIRPKRNSDKLIARKKDWDPKKYGGFVSPTVAYSVLVVAKVEKGKSKKLKSVKELLGITIMERSSFEKNPIDFLEAKGYKEVKKDLIIKLPKYSLFELENGRKRMLASARFLQKGNELALPSKYVNFLYLASHYEKLKGSPEDNEQKQLFVEQHKHYLDEIIEQISEFSKRVILADANLDKVLSAYNKHRDKPIREQAENIIHLFTLTNLGAPRAFKYFDTTIDRKVYRSTKEVLDATLIHQSITGLYETRIDLSQLGGD

SEQ ID NO: 9034 - protein, 1122 aa, Streptococcus thermophilus
MSDLVLGLDIGIGSVGVGILNKVTGEIIHKNSRIFPAAQAENNLVRRTNRQGRRLARRKKHRRVRLNRLFEESGLITDFTKISINLNPYQLRVKGLTDELSNEELFIALKNMVKHRGISYLDDASDDGNSSVGDYAQIVKENSKQLETKTPGQIQLERYQTYGQLRGDFTVEKDGKKHRLINVFPTSAYRSEALRILQTQQEFNPQITDEFINRYLEILTGKRKYYHGPGNEKSRTDYGRYRTSGETLDNIFGILIGKCTFYPDEFRAAKASYTAQEFNLLNDLNNLTVPTETKKLSKEQKNQIINYVKNEKAMGPAKLFKYIAKLLSCDVADIKGYRIDKSGKAEIHTFEAYRKMKTLETLDIEQMDRETLDKLAYVLTLNTEREGIQEALEHEFADGSFSQKQVDELVQFRKANSSIFGKGWHNFSVKLMMELIPELYETSEEQMTILTRLGKQKTTSSSNKTKYIDEKLLTEEIYNPVVAKSVRQAIKIVNAAIKEYGDFDNIVIEMARETNEDDEKKAIQKIQKANKDEKDAAMLKAANQYNGKAELPHSVFHGHKQLATKIRLWHQQGERCLYTGKTISIHDLINNSNQFEVDHILPLSITFDDSLANKVLVYATANQEKGQRTPYQALDSMDDAWSFRELKAFVRESKTLSNKKKEYLLTEEDISKFDVRKKFIERNLVDTRYASRVVLNALQEHFRAHKIDTKVSVVRGQFTSQLRRHWGIEKTRDTYHHHAVDALIIAASSQLNLWKKQKNTLVSYSEEQLLDIETGELISDDEYKESVFKAPYQHFVDTLKSKEFEDSILFSYQVDSKFNRKISDATIYATRQAKVGKDKKDETYVLGKIKDIYTQDGYDAFMKIYKKDKSKFLMYRHDPQTFEKVIEPILENYPNKQMNEKGKEVPCNPFLKYKEEHGYIRKYSKKGNGPEIKSLKYYDSKLLGNPIDITPENSKNKVVLQSLKPWRTDVYFNKATGKYEILGLKYADLQFEKGTGTYKISQEKYNDIKKKEGVDSDSEFKFTLYKNDLLLVKDTETKEQQLFRFLSRTLPKQKHYVELKPYDKQKFEGGEALIKVLGNVANGGQCIKGLAKSNISIYKVRTDVLGNQHIIKNEGDKPKLDF

SEQ ID NO: 9035 - protein, 1122 aa, Streptococcus thermophilus
MSDLVLGLDIGIGSVGVGILNKVTGEIIHKNSRIFPAAQAENNLVRRTNRQGRRLARRKKHRRVRLNRLFEESGLITDFTKISINLNPYQLRVKGLTDELSNEELFIALKNMVKHRGISYLDDASDDGNSSVGDYAQIVKENSKQLETKTPGQIQLERYQTYGQLRGDFTVEKDGKKHRLINVFPTSAYRSEALRILQTQQEFNPQITDEFINRYLEILTGKRKYYHGPGNEKSRTDYGRYRTSGETLDNIFGILIGKCTFYPDEFRAAKASYTAQEFNLLNDLNNLTVPTETKKLSKEQKNQIINYVKNEKAMGPAKLFKYIAKLLSCDVADIKGYRIDKSGKAEIHTFEAYRKMKTLETLDIEQMDRETLDKLAYVLTLNTEREGIQEALEHEFADGSFSQKQVDELVQFRKANSSIFGKGWHNFSVKLMMELIPELYETSEEQMTILTRLGKQKTTSSSNKTKYIDEKLLTEEIYNPVVAKSVRQAIKIVNAAIKEYGDFDNIVIEMARETNEDDEKKAIQKIQKANKDEKDAAMLKAANQYNGKAELPHSVFHGHKQLATKIRLWHQQGERCLYTGKTISIHDLINNSNQFEVDHILPLSITFDDSLANKVLVYATANQEKGQRTPYQALDSMDDAWSFRELKAFVRESKTLSNKKKEYLLTEEDISKFDVRKKFIERNLVDTRYASRVVLNALQEHFRAHKIDTKVSVVRGQFTSQLRRHWGIEKTRDTYHHHAVDALIIAASSQLNLWKKQKNTLVSYSEEQLLDIETGELISDDEYKESVFKAPYQHFVDTLKSKEFEDSILFSYQVDSKFNRKISDATIYATRQAKVGKDKKDETYVLGKIKDIYTQDGYDAFMKIYKKDKSKFLMYRHDPQTFEKVIEPILENYPNKQMNEKGKEVPCNPFLKYKEEHGYIRKYSKKGNGPEIKSLKYYDSKLLGNPIDITPENSKNKVVLQSLKPWRTDVYFNKNTGKYEILGLKYADLQFEKKTGTYKISQEKYNGIMKEEGVDSDSEFKFTLYKNDLLLVKDTETKEQQLFRFLSRTMPNVKYYVELKPYSKDKFEKNESLIEILGSADKSGRCIKGLGKSNISIYKVRTDVLGNQHIIKNEGDKPKLDF

SEQ ID NO: 9036 - protein, 1120 aa, Streptococcus thermophilus
MSDLVLGLDIGIGSVGVGILNKVTGEIIHKNSRIFPAAQAENNLVRRTNRQGRRLARRKKHRRVRLNRLFEESGLITDFTKISINLNPYQLRVKGLTDELSNEELFIALKNMVKHRGISYLDDASDDGNSSVGDYAQIVKENSKQLETKTPGQIQLERYQTYGQLRGDFTVEKDGKKHRLINVFPTSAYRSEALRILQTQQEFNPQITDEFINRYLEILTGKRKYYHGPGNEKSRTDYGRYRTSGETLDNIFGILIGKCTFYPDEFRAAKASYTAQEFNLLNDLNNLTVPTETKKLSKEQKNQIINYVKNEKAMGPAKLFKYIAKLLSCDVADIKGYRIDKSGKAEIHTFEAYRKMKTLETLDIEQMDRETLDKLAYVLTLNTEREGIQEALEHEFADGSFSQKQVDELVQFRKANSSIFGKGWHNFSVKLMMELIPELYETSEEQMTILTRLGKQKTTSSSNKTKYIDEKLLTEEIYNPVVAKSVRQAIKIVNAAIKEYGDFDNIVIEMARETNEDDEKKAIQKIQKANKDEKDAAMLKAANQYNGKAELPHSVFHGHKQLATKIRLWHQQGERCLYTGKTISIHDLINNSNQFEVDHILPLSITFDDSLANKVLVYATANQEKGQRTPYQALDSMDDAWSFRELKAFVRESKTLSNKKKEYLLTEEDISKFDVRKKFIERNLVDTRYASRVVLNALQEHFRAHKIDTKVSVVRGQFTSQLRRHWGIEKTRDTYHHHAVDALIIAASSQLNLWKKQKNTLVSYSEDQLLDIETGELISDDEYKESVFKAPYQHFVDTLKSKEFEDSILFSYQVDSKFNRKISDATIYATRQAKVGKDKADETYVLGKIKDIYTQDGYDAFMKIYKKDKSKFLMYRHDPQTFEKVIEPILENYPNKQINEKGKEVPCNPFLKYKEEHGYIRKYSKKGNGPEIKSLKYYDSKLGNHIDITPKDSNNKVVLQSLKPWRTDVYFNKNTGKYEILGLKYSDMQFEKGTGKYSISKEQYENIKVREGVDENSEFKFTLYKNDLLLLKDSENGEQILLRFTSRNDTSKHYVELKPYNRQKFEGSEYLIKSLGTVAKGGQCIKGLGKSNISIYKVRTDVLGNQHIIKNEGDKPKLDF

SEQ ID NO: 9037 - protein, 1120 aa, Streptococcus thermophilus
MSDLVLGLDIGIGSVGVGILNKVTGEIIHKNSRIFPAAQAENNLVRRTNRQGRRLARRKKHRRVRLNRLFEESGLITDFTKISINLNPYQLRVKGLTDELSNEELFIALKNMVKHRGISYLDDASDDGNSSVGDYAQIVKENSKQLETKTPGQIQLERYQTYGQLRGDFTVEKDGKKHRLINVFPTSAYRSEALRILQTQQEFNPQITDEFINRYLEILTGKRKYYHGPGNEKSRTDYGRYRTSGETLDNIFGILIGKCTFYPDEFRAAKASYTAQEFNLLNDLNNLTVPTETKKLSKEQKNQIINYVKNEKAMGPAKLFKYIAKLLSCDVADIKGYRIDKSGKAEIHTFEAYRKMKTLETLDIEQMDRETLDKLAYVLTLNTEREGIQEALEHEFADGSFSQKQVDELVQFRKANSSIFGKGWHNFSVKLMMELIPELYETSEEQMTILTRLGKQKTTSSSNKTKYIDEKLLTEEIYNPVVAKSVRQAIKIVNAAIKEYGDFDNIVIEMARETNEDDEKKAIQKIQKANKDEKDAAMLKAANQYNGKAELPHSVFHGHKQLATKIRLWHQQGERCLYTGKTISIHDLINNSNQFEVDHILPLSITFDDSLANKVLVYATANQEKGQRTPYQALDSMDDAWSFRELKAFVRESKTLSNKKKEYLLTEEDISKFDVRKKFIERNLVDTRYASRVVLNALQEHFRAHKIDTKVSVVRGQFTSQLRRHWGIEKTRDTYHHHAVDALIIAASSQLNLWKKQKNTLVSYSEDQLLDIETGELISDDEYKESVFKAPYQHFVDTLKSKEFEDSILFSYQVDSKFNRKISDATIYATRQAKVGKDKADETYVLGKIKDIYTQDGYDAFMKIYKKDKSKFLMYRHDPQTFEKVIEPILENYPNKQINEKGKEVPCNPFLKYKEEHGYIRKYSKKGNGPEIKSLKYYDSKLGNHIDITPKDSNNKVVLQSLKPWRTDVYFNKNTGKYEILGLKYSDMQFEKGTGKYSISKEQYENIKVREGVDENSEFKFTLYKNDLLLLKDSENGEQILLRFTSRNDTSKHYVELKPYNRQKFEGSEYLIKSLGTVVKGGRCIKGLGKSNISIYKVRTDVLGNQHIIKNEGDKPKLDF

SEQ ID NO: 9038 - protein, 1057 aa, Staphylococcus sp.
MNQKFILGLDIGITSVGYGLIDYETKNIIDAGVRLFPEANVENNEGRRSKRGSRRLKRRRIHRLERVKLLLTEYDLINKEQIPTSNNPYQIRVKGLSEILSKDELAIALLHLAKRRGIHNVDVAADKEETASDSLSTKDQINKNAKFLESRYVCELQKERLENEGHVRGVENRFLTKDIVREAKKIIDTQMQYYPEIDETFKEKYISLVETRREYFEGPGQGSPFGWNGDLKKWYEMLMGHCTYFPQELRSVKYAYSADLFNALNDLNNLIIQRDNSEKLEYHEKYHIIENVFKQKKKPTLKQIAKEIGVNPEDIKGYRITKSGTPEFTSFKLFHDLKKVVKDHAILDDIDLLNQIAEILTIYQDKDSIVAELGQLEYLMSEADKQSISELTGYTGTHSLSLKCMNMIIDELWHSSMNQMEVFTYLNMRPKKYELKGYQRIPTDMIDDAILSPVVKRTFIQSINVINKVIEKYGIPEDIIIELARENNSDDRKKFINNLQKKNEATRKRINEIIGQTGNQNAKRIVEKIRLHDQQEGKCLYSLESIPLEDLLNNPNHYEVDHIIPRSVSFDNSYHNKVLVKQSENSKKSNLTPYQYFNSGKSKLSYNQFKQHILNLSKSQDRISKKKKEYLLEERDINKFEVQKEFINRNLVDTRYATRELTNYLKAYFSANNMNVKVKTINGSFTDYLRKVWKFKKERNHGYKHHAEDALIIANADFLFKENKKLKAVNSVLEKPEIETKQLDIQVDSEDNYSEMFIIPKQVQDIKDFRNFKYSHRVDKKPNRQLINDTLYSTRKKDNSTYIVQTIKDIYAKDNTTLKKQFDKSPEKFLMYQHDPRTFEKLEVIMKQYANEKNPLAKYHEETGEYLTKYSKKNNGPIVKSLKYIGNKLGSHLDVTHQFKSSTKKLVKLSIKNYRFDVYLTEKGYKFVTIAYLNVFKKDNYYYIPKDKYQELKEKKKIKDTDQFIASFYKNDLIKLNGDLYKIIGVNSDDRNIIELDYYDIKYKDYCEINNIKGEPRIKKTIGKKTESIEKFTTDVLGNLYLHSTEKAPQLIFKRGL

SEQ ID NO: 9039 - protein, 1057 aa, Staphylococcus sp.
MNQKFILGLDIGITSVGYGLIDYETKNIIDAGVRLFPEANVENNEGRRSKRGSRRLKRRRIHRLERVKLLLTEYDLINKEQIPTSNNPYQIRVKGLSEILSKDELAIALLHLAKRRGIHNVDVAADKEETASDSLSTKDQINKNAKFLESRYVCELQKERLENEGHVRGVENRFLTKDIVREAKKIIDTQMQYYPEIDETFKEKYISLVETRREYFEGPGQGSPFGWNGDLKKWYEMLMGHCTYFPQELRSVKYAYSADLFNALNDLNNLIIQRDNSEKLEYHEKYHIIENVFKQKKKPTLKQIAKEIGVNPEDIKGYRITKSGTPEFTSFKLFHDLKKVVKDHAILDDIDLLNQIAEILTIYQDKDSIVAELGQLEYLMSEADKQSISELTGYTGTHSLSLKCMNMIIDELWHSSMNQMEVFTYLNMRPKKYELKGYQRIPTDMIDDAILSPVVKRTFIQSINVINKVIEKYGIPEDIIIELARENNSDDRKKFINNLQKKNEATRKRINEIIGQTGNQNAKRIVEKIRLHDQQEGKCLYSLESIPLEDLLNNPNHYEVDHIIPRSVSFDNSYHNKVLVKQSENSKKSNLTPYQYFNSGKSKLSYNQFKQHILNLSKSQDRISKKKKEYLLEERDINKFEVQKEFINRNLVDTRYATRELTSYLKAYFSANNMDVKVKTINGSFTNHLRKVWRFDKYRNHGYKHHAEDALIIANADFLFKENKKLQNTNKILEKPTIENNTKKVTVEKEEDYNNVFETPKLVEDIKQYRDYKFSHRVDKKPNRQLINDTLYSTRMKDEHDYIVQTITDIYGKDNTNLKKQFNKNPEKFLMYQNDPKTFEKLSIIMKQYSDEKNPLAKYYEETGEYLTKYSKKNNGPIVKKIKLLGNKVGNHLDVTNKYENSTKKLVKLSIKNYRFDVYLTEKGYKFVTIAYLNVFKKDNYYYIPKDKYQELKEKKKIKDTDQFIASFYKNDLIKLNGDLYKIIGVNSDDRNIIELDYYDIKYKDYCEINNIKGEPRIKKTIGKKTESIEKFTTDVLGNLYLHSTEKAPQLIFKRGL

SEQ ID NO: 9040-10050 - skipped (1011 entries)

SEQ ID NO: 10051 - DNA, 24 bp, synthetic construct
  source 1..24: mol_type = other DNA
gttgtagctccctttctcatttcg

SEQ ID NO: 10052 - DNA, 25 bp, synthetic construct
  source 1..25: mol_type = other DNA
gttgtagctccctttttcatttcgc

SEQ ID NO: 10053 - DNA, 14 bp, synthetic construct
  source 1..14: mol_type = other DNA
gttttagtactctg

SEQ ID NO: 10054 - DNA, 14 bp, synthetic construct
  source 1..14: mol_type = other DNA
gttttagtactctg

SEQ ID NO: 10055 - DNA, 14 bp, synthetic construct
  source 1..14: mol_type = other DNA
gttttagtactctg

SEQ ID NO: 10056 - DNA, 14 bp, synthetic construct
  source 1..14: mol_type = other DNA
gttttagtactctg

SEQ ID NO: 10057 - DNA, 12 bp, synthetic construct
  source 1..12: mol_type = other DNA
gttttagagcta

SEQ ID NO: 10058 - DNA, 12 bp, synthetic construct
  source 1..12: mol_type = other DNA
gttttagagcta

SEQ ID NO: 10059 - DNA, 12 bp, synthetic construct
  source 1..12: mol_type = other DNA
gttttagagcta

SEQ ID NO: 10060 - DNA, 12 bp, synthetic construct
  source 1..12: mol_type = other DNA
gttttagagcta

SEQ ID NO: 10061 - DNA, 14 bp, synthetic construct
  source 1..14: mol_type = other DNA
gtctttgtactctg

SEQ ID NO: 10062 - DNA, 16 bp, synthetic construct
  source 1..16: mol_type = other DNA
gctatagttccttact

SEQ ID NO: 10063 - DNA, 14 bp, synthetic construct
  source 1..14: mol_type = other DNA
gtcttagtactctg

SEQ ID NO: 10064 - DNA, 14 bp, synthetic construct
  source 1..14: mol_type = other DNA
gtcttagtactctg

SEQ ID NO: 10065 - DNA, 14 bp, synthetic construct
  source 1..14: mol_type = other DNA
gtcttagtactctg

SEQ ID NO: 10066 - DNA, 14 bp, synthetic construct
  source 1..14: mol_type = other DNA
gtcttagtactctg

SEQ ID NO: 10067 - DNA, 12 bp, synthetic construct
  source 1..12: mol_type = other DNA
actggggttcag

SEQ ID NO: 10068 - DNA, 12 bp, synthetic construct
  source 1..12: mol_type = other DNA
gttttagtccct

SEQ ID NO: 10069 - DNA, 16 bp, synthetic construct
  source 1..16: mol_type = other DNA
gtcatagttcccctga

SEQ ID NO: 10070 - DNA, 12 bp, synthetic construct
  source 1..12: mol_type = other DNA
gttttagagcta

SEQ ID NO: 10071 - DNA, 24 bp, synthetic construct
  source 1..24: mol_type = other DNA
gttgtagctccctttctcatttcg

SEQ ID NO: 10072 - DNA, 12 bp, synthetic construct
  source 1..12: mol_type = other DNA
gttttagagcta

SEQ ID NO: 10073 - DNA, 12 bp, synthetic construct
  source 1..12: mol_type = other DNA
gttttagagcta

SEQ ID NO: 10074 - DNA, 17 bp, synthetic construct
  source 1..17: mol_type = other DNA
gtttaagagctatgctg

SEQ ID NO: 10075 - DNA, 17 bp, synthetic construct
  source 1..17: mol_type = other DNA
gtttaagagctatgctg

SEQ ID NO: 10076 - DNA, 17 bp, synthetic construct
  source 1..17: mol_type = other DNA
gtttaagagctatgctg

SEQ ID NO: 10077 - DNA, 12 bp, synthetic construct
  source 1..12: mol_type = other DNA
gttttagagcta

SEQ ID NO: 10078 - DNA, 12 bp, synthetic construct
  source 1..12: mol_type = other DNA
gttttagagcta

SEQ ID NO: 10079 - DNA, 12 bp, synthetic construct
  source 1..12: mol_type = other DNA
gttttagagcta

SEQ ID NO: 10080 - DNA, 12 bp, synthetic construct
  source 1..12: mol_type = other DNA
gttttagagcta

SEQ ID NO: 10081 - DNA, 12 bp, synthetic construct
  source 1..12: mol_type = other DNA
gttttagagcta

SEQ ID NO: 10082 - DNA, 17 bp, synthetic construct
  source 1..17: mol_type = other DNA
gtttaagagctatgctg

SEQ ID NO: 10083 - DNA, 17 bp, synthetic construct
  source 1..17: mol_type = other DNA
gtttaagagctatgctg

SEQ ID NO: 10084 - DNA, 14 bp, synthetic construct
  source 1..14: mol_type = other DNA
gtctttgtactctg

SEQ ID NO: 10085 - DNA, 14 bp, synthetic construct
  source 1..14: mol_type = other DNA
gtctttgtactctg

SEQ ID NO: 10086 - DNA, 14 bp, synthetic construct
  source 1..14: mol_type = other DNA
gtctttgtactctg

SEQ ID NO: 10087 - DNA, 14 bp, synthetic construct
  source 1..14: mol_type = other DNA
gtctttgtactctg

SEQ ID NO: 10088 - DNA, 14 bp, synthetic construct
  source 1..14: mol_type = other DNA
gttttagtactctg

SEQ ID NO: 10089 - DNA, 14 bp, synthetic construct
  source 1..14: mol_type = other DNA
gttttagtactctg

SEQ ID NO: 10090-10150 - skipped (61 entries)

SEQ ID NO: 10151 - DNA, 93 bp, synthetic construct
  source 1..93: mol_type = other DNA
cgaaatgagaaccgttgctacaataaggccgtctgaaaagatgtgccgcaacgctctgccccttaaagcttctgctttaaggggcatcgttta

SEQ ID NO: 10152 - DNA, 82 bp, synthetic construct
  source 1..82: mol_type = other DNA
gcgaaatgaaaaacgttgttacaataagagatgaatttctcgcaaagctctgcctcttgaaatttcggtttcaagaggcatc

SEQ ID NO: 10153 - DNA, 58 bp, synthetic construct
  source 1..58: mol_type = other DNA
cagaatctactaaaacaaggcaaaatgccgtgtttatctcgtcaacttgttggcgaga

SEQ ID NO: 10154 - DNA, 58 bp, synthetic construct; identical to SEQ ID NO: 10153
  source 1..58: mol_type = other DNA

SEQ ID NO: 10155 - DNA, 58 bp, synthetic construct; identical to SEQ ID NO: 10153
  source 1..58: mol_type = other DNA

SEQ ID NO: 10156 - DNA, 58 bp, synthetic construct; identical to SEQ ID NO: 10153
  source 1..58: mol_type = other DNA

SEQ ID NO: 10157 - DNA, 60 bp, synthetic construct
  source 1..60: mol_type = other DNA
tagcaagttaaaataaggctagtccgttatcaacttgaaaaagtggcaccgagtcggtgc

SEQ ID NO: 10158 - DNA, 60 bp, synthetic construct; identical to SEQ ID NO: 10157
  source 1..60: mol_type = other DNA

SEQ ID NO: 10159 - DNA, 60 bp, synthetic construct; identical to SEQ ID NO: 10157
  source 1..60: mol_type = other DNA

SEQ ID NO: 10160 - DNA, 60 bp, synthetic construct; identical to SEQ ID NO: 10157
  source 1..60: mol_type = other DNA

SEQ ID NO: 10161 - DNA, 66 bp, synthetic construct
  source 1..66: mol_type = other DNA
cagaagctacaaagataaggcttcatgccgaaatcaacaccctgtcattttatggcagggtgtttt

SEQ ID NO: 10162 - DNA, 127 bp, synthetic construct
  source 1..127: mol_type = other DNA
ggtaagttgctatagtaagggcaacagacccgaggcgttggggatcgcctagcccgtgtttacgggctctccccatattcaaaataatgacagacgagcaccttggagcatttatctccgaggtgct

SEQ ID NO: 10163 - DNA, 58 bp, synthetic construct
  source 1..58: mol_type = other DNA
cagaatctactaagacaaggcaaaatgccgtgtttatctcgtcaacttgttggcgaga

SEQ ID NO: 10164 - DNA, 58 bp, synthetic construct; identical to SEQ ID NO: 10163
  source 1..58: mol_type = other DNA

SEQ ID NO: 10165 - DNA, 58 bp, synthetic construct; identical to SEQ ID NO: 10163
  source 1..58: mol_type = other DNA

SEQ ID NO: 10166 - DNA, 58 bp, synthetic construct; identical to SEQ ID NO: 10163
  source 1..58: mol_type = other DNA

SEQ ID NO: 10167 - DNA, 76 bp, synthetic construct
  source 1..76: mol_type = other DNA
ctgaacctcagtaagcattggctcgtttccaatgttgattgctccgccggtgctccttatttttaagggcgccggc

SEQ ID NO: 10168 - DNA, 57 bp, synthetic construct
  source 1..57: mol_type = other DNA
agggactaaaataaagagtttgcgggactctgcggggttacaatcccctaaaaccgc

SEQ ID NO: 10169 - DNA, 98 bp, synthetic construct
  source 1..98: mol_type = other DNA
tcagggttactatgataagggctttctgcctaaggcagactgacccgcggcgttggggatcgcctgtcgcccgcttttggcgggcattccccatcctt

SEQ ID NO: 10170 - DNA, 60 bp, synthetic construct; identical to SEQ ID NO: 10157
  source 1..60: mol_type = other DNA

SEQ ID NO: 10171 - DNA, 93 bp, synthetic construct; identical to SEQ ID NO: 10151
  source 1..93: mol_type = other DNA

SEQ ID NO: 10172 - DNA, 60 bp, synthetic construct; identical to SEQ ID NO: 10157
  source 1..60: mol_type = other DNA

SEQ ID NO: 10173 - DNA, 60 bp, synthetic construct; identical to SEQ ID NO: 10157
  source 1..60: mol_type = other DNA

SEQ ID NO: 10174 - DNA, 65 bp, synthetic construct
  source 1..65: mol_type = other DNA
cagcatagcaagtttaaataaggctagtccgttatcaacttgaaaaagtggcaccgagtcggtgc

SEQ ID NO: 10175 - DNA, 65 bp, synthetic construct; identical to SEQ ID NO: 10174
  source 1..65: mol_type = other DNA

SEQ ID NO: 10176 - DNA, 65 bp, synthetic construct; identical to SEQ ID NO: 10174
  source 1..65: mol_type = other DNA

SEQ ID NO: 10177 - DNA, 60 bp, synthetic construct; identical to SEQ ID NO: 10157
  source 1..60: mol_type = other DNA

SEQ ID NO: 10178 - DNA, 60 bp, synthetic construct; identical to SEQ ID NO: 10157
  source 1..60: mol_type = other DNA

SEQ ID NO: 10179 - DNA, 60 bp, synthetic construct; identical to SEQ ID NO: 10157
  source 1..60: mol_type = other DNA

SEQ ID NO: 10180 - DNA, 60 bp, synthetic construct; identical to SEQ ID NO: 10157
  source 1..60: mol_type = other DNA

SEQ ID NO: 10181 - DNA, 60 bp, synthetic construct; identical to SEQ ID NO: 10157
  source 1..60: mol_type = other DNA

SEQ ID NO: 10182 - DNA, 65 bp, synthetic construct; identical to SEQ ID NO: 10174
  source 1..65: mol_type = other DNA

SEQ ID NO: 10183 - DNA, 65 bp, synthetic construct; identical to SEQ ID NO: 10174
  source 1..65: mol_type = other DNA

SEQ ID NO: 10184 - DNA, 66 bp, synthetic construct; identical to SEQ ID NO: 10161
  source 1..66: mol_type = other DNA

SEQ ID NO: 10185 - DNA, 66 bp, synthetic construct; identical to SEQ ID NO: 10161
  source 1..66: mol_type = other DNA

SEQ ID NO: 10186 - DNA, 66 bp, synthetic construct; identical to SEQ ID NO: 10161
  source 1..66: mol_type = other DNA

SEQ ID NO: 10187 - DNA, 66 bp, synthetic construct; identical to SEQ ID NO: 10161
  source 1..66: mol_type = other DNA

SEQ ID NO: 10188 - DNA, 62 bp, synthetic construct
  source 1..62: mol_type = other DNA
cagaatctactgaaacaagacaatatgtcgtgtttatcccatcaatttattggtgggatttt

SEQ ID NO: 10189 - DNA, 62 bp, synthetic construct; identical to SEQ ID NO: 10188
  source 1..62: mol_type = other DNA

SEQ ID NO: 10190-10192 - skipped (3 entries)

SEQ ID NO: 10193 - DNA, 68 bp, synthetic construct
  source 1..68: mol_type = other DNA
tagcaagttaaaataaggctagtccgttatcaacttggacttcggtccaagtggcaccgagtcggtgc

SEQ ID NO: 10194 - DNA, 68 bp, synthetic construct
  source 1..68: mol_type = other DNA
tagcaagttaaaataaggctagtccgttatcaacttggagcttgctccaagtggcaccgagtcggtgc

SEQ ID NO: 10195 - DNA, 76 bp, synthetic construct
  source 1..76: mol_type = other DNA
gttttagagctagaaatagcaagttaaaataaggctagtccgttatcgacttgaaaaagtcgcaccgagtcggtgc

SEQ ID NO: 10196-11000 - skipped (805 entries)

SEQ ID NO: 11001 - protein, 1367 aa, unidentified
DKKYSIGLDIGTNSVGWAVITDEYKVPSKKFKVLGNTDRHSIKKNLIGALLFDSGETAEATRLKRTARRRYTRRKNRICYLQEIFSNEMAKVDDSFFHRLEESFLVEEDKKHERHPIFGNIVDEVAYHEKYPTIYHLRKKLVDSTDKADLRLIYLALAHMIKFRGHFLIEGDLNPDNSDVDKLFIQLVQTYNQLFEENPINASGVDAKAILSARLSKSRRLENLIAQLPGEKKNGLFGNLIALSLGLTPNFKSNFDLAEDAKLQLSKDTYDDDLDNLLAQIGDQYADLFLAAKNLSDAILLSDILRVNTEITKAPLSASMIKRYDEHHQDLTLLKALVRQQLPEKYKEIFFDQSKNGYAGYIDGGASQEEFYKFIKPILEKMDGTEELLVKLNREDLLRKQRTFDNGSIPHQIHLGELHAILRRQEDFYPFLKDNREKIEKILTFRIPYYVGPLARGNSRFAWMTRKSEETITPWNFEEVVDKGASAQSFIERMTNFDKNLPNEKVLPKHSLLYEYFTVYNELTKVKYVTEGMRKPAFLSGEQKKAIVDLLFKTNRKVTVKQLKEDYFKKIECFDSVEISGVEDRFNASLGTYHDLLKIIKDKDFLDNEENEDILEDIVLTLTLFEDREMIEERLKTYAHLFDDKVMKQLKRRRYTGWGRLSRKLINGIRDKQSGKTILDFLKSDGFANRNFMQLIHDDSLTFKEDIQKAQVSGQGDSLHEHIANLAGSPAIKKGILQTVKVVDELVKVMGRHKPENIVIEMARENQTTQKGQKNSRERMKRIEEGIKELGSQILKEHPVENTQLQNEKLYLYYLQNGRDMYVDQELDINRLSDYDVDAIVPQSFLKDDSIDNKVLTRSDKNRGKSDNVPSEEVVKKMKNYWRQLLNAKLITQRKFDNLTKAERGGLSELDKAGFIKRQLVETRQITKHVAQILDSRMNTKYDENDKLIREVKVITLKSKLVSDFRKDFQFYKVREINNYHHAHDAYLNAVVGTALIKKYPKLESEFVYGDYKVYDVRKMIAKSEQEIGKATAKYFFYSNIMNFFKTEITLANGEIRKRPLIETNGETGEIVWDKGRDFATVRKVLSMPQVNIVKKTEVQTGGFSKESILPKRNSDKLIARKKDWDPKKYGGFDSPTVAYSVLVVAKVEKGKSKKLKSVKELLGITIMERSSFEKNPIDFLEAKGYKEVKKDLIIKLPKYSLFELENGRKRMLASAGELQKGNELALPSKYVNFLYLASHYEKLKGSPEDNEQKQLFVEQHKHYLDEIIEQISEFSKRVILADANLDKVLSAYNKHRDKPIREQAENIIHLFTLTNLGAPAAFKYFDTTIDRKRYTSTKEVLDATLIHQSITGLYETRIDLSQLGGD

SEQ ID NO: 11002 - protein, 33 aa, synthetic construct; identical to SEQ ID NO: 5006

SEQ ID NO: 11003 - skipped

SEQ ID NO: 11004 - DNA, 62 bp, synthetic construct
  source 1..62: mol_type = other DNA
cactcctccccatcctctccctctgtccctctgtccctctgaccctgcactgtcccagcacc

SEQ ID NO: 11005 - DNA, 122 bp, synthetic construct
  source 1..122: mol_type = other DNA
caggacacagccttggatcaggacagagacttgggggccatcctgcccctccaacccgacatgtgtacctcagctttttccctcacttgcatcaataaagcttctgtgtttggaacagctaa

SEQ ID NO: 11006 - RNA, 47 nt, synthetic construct
  source 1..47: mol_type = other RNA
gggaaataagagagaaaagaagagtaagaagaaatataagagccacc

SEQ ID NO: 11007 - RNA, 110 nt, synthetic construct
  source 1..110: mol_type = other RNA
tgataataggctggagcctcggtggccatgcttcttgccccttgggcctccccccagcccctcctccccttcctgcacccgtacccccgtggtctttgaataaagtctga

SEQ ID NO: 11008 - RNA, 47 nt, synthetic construct; identical to SEQ ID NO: 11006
  source 1..47: mol_type = other RNA

SEQ ID NO: 11009 - RNA, 110 nt, synthetic construct; identical to SEQ ID NO: 11007
  source 1..110: mol_type = other RNA

SEQ ID NO: 11010 - skipped

SEQ ID NO: 11011 - DNA, 20 bp, synthetic construct
  source 1..20: mol_type = other DNA
gccgaagcactgcacgccgt

SEQ ID NO: 11012 - DNA, 76 bp, synthetic construct
  source 1..76: mol_type = other DNA
gttttagagctagaaatagcaagttaaaataaggctagtccgttatcaacttgaaaaagtggcaccgagtcggtgc

SEQ ID NO: 11013 - DNA, 13 bp, synthetic construct
  source 1..13: mol_type = other DNA
accctgacgtacg

SEQ ID NO: 11014 - DNA, 13 bp, synthetic construct
  source 1..13: mol_type = other DNA
gcgtgcagtgctt

SEQ ID NO: 11015 - DNA, 20 bp, synthetic construct
  source 1..20: mol_type = other DNA
agaagtcgtgctgcttcatg

SEQ ID NO: 11016 - DNA, 76 bp, synthetic construct; identical to SEQ ID NO: 11012
  source 1..76: mol_type = other DNA

SEQ ID NO: 11017 - DNA, 47 bp, synthetic construct
  source 1..47: mol_type = other DNA
accctgacctacggcgtgcagtgcttcggccgctaccccgatcacat

SEQ ID NO: 11018 - DNA, 13 bp, synthetic construct
  source 1..13: mol_type = other DNA
gaagcagcacgac

SEQ ID NO: 11019-11094 - skipped (76 entries)

SEQ ID NO: 11095 - protein, 9 aa, synthetic construct
PAAKRVKLD

SEQ ID NO: 11096 - protein, 1367 aa, synthetic construct
DKKYSIGLDIGTNSVGWAVITDEYKVPSKKFKVLGNTDRHSIKKNLIGALLFDSGETAEATRLKRTARRRYTRRKNRICYLQEIFSNEMAKVDDSFFHRLEESFLVEEDKKHERHPIFGNIVDEVAYHEKYPTIYHLRKKLVDSTDKADLRLIYLALAHMIKFRGHFLIEGDLNPDNSDVDKLFIQLVQTYNQLFEENPINASGVDAKAILSARLSKSRRLENLIAQLPGEKKNGLFGNLIALSLGLTPNFKSNFDLAEDAKLQLSKDTYDDDLDNLLAQIGDQYADLFLAAKNLSDAILLSDILRVNTEITKAPLSASMIKRYDEHHQDLTLLKALVRQQLPEKYKEIFFDQSKNGYAGYIDGGASQEEFYKFIKPILEKMDGTEELLVKLNREDLLRKQRTFDNGSIPHQIHLGELHAILRRQEDFYPFLKDNREKIEKILTFRIPYYVGPLARGNSRFAWMTRKSEETITPWNFEEVVDKGASAQSFIERMTNFDKNLPNEKVLPKHSLLYEYFTVYNELTKVKYVTEGMRKPAFLSGEQKKAIVDLLFKTNRKVTVKQLKEDYFKKIECFDSVEISGVEDRFNASLGTYHDLLKIIKDKDFLDNEENEDILEDIVLTLTLFEDREMIEERLKTYAHLFDDKVMKQLKRRRYTGWGRLSRKLINGIRDKQSGKTILDFLKSDGFANRNFMQLIHDDSLTFKEDIQKAQVSGQGDSLHEHIANLAGSPAIKKGILQTVKVVDELVKVMGRHKPENIVIEMARENQTTQKGQKNSRERMKRIEEGIKELGSQILKEHPVENTQLQNEKLYLYYLQNGRDMYVDQELDINRLSDYDVDHIVPQSFLKDDSIDNKVLTRSDKARGKSDNVPSEEVVKKMKNYWRQLLNAKLITQRKFDNLTKAERGGLSELDKAGFIKRQLVETRQITKHVAQILDSRMNTKYDENDKLIREVKVITLKSKLVSDFRKDFQFYKVREINNYHHAHDAYLNAVVGTALIKKYPKLESEFVYGDYKVYDVRKMIAKSEQEIGKATAKYFFYSNIMNFFKTEITLANGEIRKRPLIETNGETGEIVWDKGRDFATVRKVLSMPQVNIVKKTEVQTGGFSKESILPKRNSDKLIARKKDWDPKKYGGFDSPTVAYSVLVVAKVEKGKSKKLKSVKELLGITIMERSSFEKNPIDFLEAKGYKEVKKDLIIKLPKYSLFELENGRKRMLASAGELQKGNELALPSKYVNFLYLASHYEKLKGSPEDNEQKQLFVEQHKHYLDEIIEQISEFSKRVILADANLDKVLSAYNKHRDKPIREQAENIIHLFTLTNLGAPAAFKYFDTTIDRKRYTSTKEVLDATLIHQSITGLYETRIDLSQLGGD

SEQ ID NO: 11097 - protein, 10 aa, synthetic construct
KRTADGSEFE

SEQ ID NO: 11098 - protein, 19 aa, synthetic construct
KRTADGSEFESPKKKAKVE

SEQ ID NO: 11099 - protein, 29 aa, synthetic construct
KRTADGSEFEKRTADGSEFESPKKKAKVE

SEQ ID NO: 11100-12000 - skipped (901 entries)

SEQ ID NO: 12001 - protein, 8 aa, synthetic construct
EAAAKGSS

SEQ ID NO: 12002 - protein, 20 aa, synthetic construct
EAAAKEAAAKEAAAKEAAAK

SEQ ID NO: 12003 - protein, 8 aa, synthetic construct
PAPEAAAK

SEQ ID NO: 12004 - protein, 11 aa, synthetic construct
EAAAKPAPGGG

SEQ ID NO: 12005 - protein, 18 aa, synthetic construct
GSSGSSGSSGSSGSSGSS

SEQ ID NO: 12006 - protein, 11 aa, synthetic construct
PAPGGGEAAAK

SEQ ID NO: 12007 - protein, 46 aa, synthetic construct; identical to SEQ ID NO: 5217

SEQ ID NO: 12008 - protein, 8 aa, synthetic construct
GSSEAAAK

SEQ ID NO: 12009 - protein, 11 aa, synthetic construct
EAAAKPAPGGS

SEQ ID NO: 12010 - protein, 18 aa, synthetic construct
GGSGGSGGSGGSGGSGGS

SEQ ID NO: 12011 - protein, 46 aa, synthetic construct; identical to SEQ ID NO: 5217

SEQ ID NO: 12012 - protein, 46 aa, synthetic construct; identical to SEQ ID NO: 5217

SEQ ID NO: 12013 - protein, 15 aa, synthetic construct
EAAAKEAAAKEAAAK

SEQ ID NO: 12014 - protein, 11 aa, synthetic construct
PAPEAAAKGSS

SEQ ID NO: 12015 - protein, 46 aa, synthetic construct; identical to SEQ ID NO: 5217

SEQ ID NO: 12016 - protein, 15 aa, synthetic construct
EAAAKEAAAKEAAAK

SEQ ID NO: 12017 - protein, 46 aa, synthetic construct; identical to SEQ ID NO: 5217

SEQ ID NO: 12018 - protein, 11 aa, synthetic construct
PAPAPAPAPAP

SEQ ID NO: 12019 - protein, 11 aa, synthetic construct
PAPAPAPAPAP

SEQ ID NO: 12020 - protein, 11 aa, synthetic construct
EAAAKGGSPAP

SEQ ID NO: 12021 - skipped

SEQ ID NO: 12022 - protein, 9 aa, synthetic construct
PAPGGGGSS

SEQ ID NO: 12023 - protein, 16 aa, synthetic construct
SGSETPGTSESATPES

SEQ ID NO: 12024 - protein, 11 aa, synthetic construct
PAPEAAAKGSS

SEQ ID NO: 12025 - protein, 11 aa, synthetic construct
EAAAKGGSGGG

SEQ ID NO: 12026 - protein, 10 aa, synthetic construct
GGGGSGGGGS

SEQ ID NO: 12027 - protein, 9 aa, synthetic construct
GGGPAPGSS

SEQ ID NO: 12028 - protein, 18 aa, synthetic construct
GGSGGSGGSGGSGGSGGS

SEQ ID NO: 12029 - protein, 30 aa, synthetic construct; identical to SEQ ID NO: 5112

SEQ ID NO: 12030 - protein, 6 aa, synthetic construct
GSSPAP

SEQ ID NO: 12031 - protein, 11 aa, synthetic construct
EAAAKGSSPAP

SEQ ID NO: 12032 - protein, 11 aa, synthetic construct
GSSGGGEAAAK

SEQ ID NO: 12033 - protein, 18 aa, synthetic construct
GGSGGSGGSGGSGGSGGS

SEQ ID NO: 12034 - protein, 9 aa, synthetic construct
PAPAPAPAP

SEQ ID NO: 12035 - protein, 20 aa, synthetic construct
EAAAKEAAAKEAAAKEAAAK

SEQ ID NO: 12036 - protein, 11 aa, synthetic construct
EAAAKGGSPAP

SEQ ID NO: 12037 - protein, 11 aa, synthetic construct
PAPGGSEAAAK

SEQ ID NO: 12038 - protein, 30 aa, synthetic construct; identical to SEQ ID NO: 5112

SEQ ID NO: 12039 - protein, 15 aa, synthetic construct
EAAAKGGGGSEAAAK

SEQ ID NO: 12040 - protein, 46 aa, synthetic construct; identical to SEQ ID NO: 5217

SEQ ID NO: 12041 - skipped

SEQ ID NO: 12042 - protein, 12 aa, synthetic construct
GSSGSSGSSGSS

SEQ ID NO: 12043 - protein, 11 aa, synthetic construct
GSSPAPEAAAK

SEQ ID NO: 12044 - protein, 11 aa, synthetic construct
GGSPAPEAAAK

SEQ ID NO: 12045 - protein, 11 aa, synthetic construct
GGGEAAAKGGS

SEQ ID NO: 12046 - protein, 25 aa, synthetic construct
EAAAKEAAAKEAAAKEAAAKEAAAK

SEQ ID NO: 12047 - protein, 8 aa, synthetic construct
GGGGGGGG

SEQ ID NO: 12048 - protein, 6 aa, synthetic construct
GGGPAP

SEQ ID NO: 12049 - protein, 13 aa, synthetic construct
PAPAPAPAPAPAP

SEQ ID NO: 12050 - protein, 18 aa, synthetic construct
GGSGGSGGSGGSGGSGGS

SEQ ID NO: 12051 - skipped

SEQ ID NO: 12052 - protein, 18 aa, synthetic construct
GGSGGSGGSGGSGGSGGS

SEQ ID NO: 12053 - protein, 13 aa, synthetic construct
PAPAPAPAPAPAP

SEQ ID NO: 12054 - protein, 11 aa, synthetic construct
EAAAKPAPGSS

SEQ ID NO: 12055 - protein, 20 aa, synthetic construct
EAAAKEAAAKEAAAKEAAAK

SEQ ID NO: 12056 - protein, 8 aa, synthetic construct
EAAAKGGS

SEQ ID NO: 12057 - protein, 15 aa, synthetic construct
GGGGSEAAAKGGGGS

SEQ ID NO: 12058 - protein, 11 aa, synthetic construct
EAAAKPAPGSS

SEQ ID NO: 12059 - protein, 20 aa, synthetic construct
GGGGSGGGGSGGGGSGGGGS

SEQ ID NO: 12060 - protein, 11 aa, synthetic construct
EAAAKGGGGGS

SEQ ID NO: 12061 - protein, 6 aa, synthetic construct
GGSPAP

SEQ ID NO: 12062 - protein, 11 aa, synthetic construct
EAAAKGGGPAP

SEQ ID NO: 12063 - protein, 25 aa, synthetic construct
EAAAKEAAAKEAAAKEAAAKEAAAK

SEQ ID NO: 12064 - skipped

SEQ ID NO: 12065 - protein, 5 aa, synthetic construct
EAAAK

SEQ ID NO: 12066 - protein, 9 aa, synthetic construct
GGSGSSPAP

SEQ ID NO: 12067 - protein, 18 aa, synthetic construct
GSSGSSGSSGSSGSSGSS

SEQ ID NO: 12068 - protein, 11 aa, synthetic construct
GSSEAAAKGGG

SEQ ID NO: 12069 - protein, 11 aa, synthetic construct
GGGEAAAKGGS

SEQ ID NO: 12070 - protein, 15 aa, synthetic construct
EAAAKGGGGSEAAAK

SEQ ID NO: 12071 - protein, 15 aa, synthetic construct
GGGGSGGGGSGGGGS

SEQ ID NO: 12072 - protein, 20 aa, synthetic construct
GGGGSGGGGSGGGGSGGGGS

SEQ ID NO: 12073 - protein, 16 aa, synthetic construct
SGSETPGTSESATPES

SEQ ID NO: 12074 - protein, 11 aa, synthetic construct
GGGEAAAKPAP

SEQ ID NO: 12075 - protein, 11 aa, synthetic construct
EAAAKGSSGGG

SEQ ID NO: 12076 - protein, 25 aa, synthetic construct
EAAAKEAAAKEAAAKEAAAKEAAAK

SEQ ID NO: 12077 - protein, 12 aa, synthetic construct
GGSGGSGGSGGS

SEQ ID NO: 12078 - protein, 11 aa, synthetic construct
GGSEAAAKPAP

SEQ ID NO: 12079 - protein, 11 aa, synthetic construct
EAAAKGSSGGG

SEQ ID NO: 12080 - protein, 5 aa, synthetic construct
GGGGS

SEQ ID NO: 12081 - protein, 11 aa, synthetic construct
GGGEAAAKGSS

SEQ ID NO: 12082 - protein, 13 aa, synthetic construct
PAPAPAPAPAPAP

SEQ ID NO: 12083 - protein, 20 aa, synthetic construct
GGGGSGGGGSGGGGSGGGGS

SEQ ID NO: 12084 - protein, 11 aa, synthetic construct
GGGEAAAKGSS

SEQ ID NO: 12085 - protein, 9 aa, synthetic construct
PAPGGSGSS

SEQ ID NO: 12086 - protein, 12 aa, synthetic construct
GSAGSAAGSGEF

SEQ ID NO: 12087 - protein, 11 aa, synthetic construct
PAPGGSEAAAK

SEQ ID NO: 12088 - protein, 6 aa, synthetic construct
GGSGSS

SEQ ID NO: 12089 - protein, 9 aa, synthetic construct
PAPGGGGSS

SEQ ID NO: 12090 - protein, 9 aa, synthetic construct
GSSGSSGSS

SEQ ID NO: 12091 - protein, 46 aa, synthetic construct; identical to SEQ ID NO: 5217

SEQ ID NO: 12092 - protein, 5 aa, synthetic construct
EAAAK

SEQ ID NO: 12093 - protein, 12 aa, synthetic construct
GSSGSSGSSGSS

SEQ ID NO: 12094 - protein, 9 aa, synthetic construct
PAPGGGGSS

SEQ ID NO: 12095 - protein, 11 aa, synthetic construct
GGGEAAAKGGS

SEQ ID NO: 12096 - protein, 11 aa, synthetic construct
PAPGGGEAAAK

SEQ ID NO: 12097 - protein, 9 aa, synthetic construct
GGGGGSPAP

SEQ ID NO: 12098 - protein, 8 aa, synthetic construct
EAAAKGGS

SEQ ID NO: 12099 - protein, 11 aa, synthetic construct
EAAAKGSSPAP

SEQ ID NO: 12100 - protein, 8 aa, synthetic construct
PAPEAAAK

SEQ ID NO: 12101 - protein, 12 aa, synthetic construct
GGSGGSGGSGGS

SEQ ID NO: 12102 - protein, 9 aa, synthetic construct
GGGPAPGGS

SEQ ID NO: 12103 - protein, 12 aa, synthetic construct
GSSGSSGSSGSS

SEQ ID NO: 12104 - protein, 11 aa, synthetic construct
EAAAKPAPGGS

SEQ ID NO: 12105 - protein, 6 aa, synthetic construct
GSSGSS

SEQ ID NO: 12106 - protein, 20 aa, synthetic construct
EAAAKEAAAKEAAAKEAAAK

SEQ ID NO: 12107 - protein, 20 aa, synthetic construct
EAAAKEAAAKEAAAKEAAAK

SEQ ID NO: 12108 - skipped

SEQ ID NO: 12109 - protein, 10 aa, synthetic construct
EAAAKEAAAK

SEQ ID NO: 12110 - protein, 11 aa, synthetic construct
PAPEAAAKGGG

SEQ ID NO: 12111 - protein, 11 aa, synthetic construct
GGSGSSEAAAK

SEQ ID NO: 12112 - protein, 25 aa, synthetic construct
EAAAKEAAAKEAAAKEAAAKEAAAK

SEQ ID NO: 12113 - protein, 11 aa, synthetic construct
GSSEAAAKPAP

SEQ ID NO: 12114 - protein, 25 aa, synthetic construct
EAAAKEAAAKEAAAKEAAAKEAAAK

SEQ ID NO: 12115 - protein, 8 aa, synthetic construct
EAAAKGGG

SEQ ID NO: 12116 - protein, 9 aa, synthetic construct
GSSPAPGGG

SEQ ID NO: 12117 - protein, 9 aa, synthetic construct
GGGPAPGSS

SEQ ID NO: 12118 - protein, 6 aa, synthetic construct
GGGGGS

SEQ ID NO: 12119 - protein, 30 aa, synthetic construct; identical to SEQ ID NO: 5130

SEQ ID NO: 12120 - protein, 25 aa, synthetic construct
GGGGSGGGGSGGGGSGGGGSGGGGS

SEQ ID NO: 12121 - protein, 15 aa, synthetic construct
EAAAKEAAAKEAAAK

SEQ ID NO: 12122 - protein, 9 aa, synthetic construct
PAPAPAPAP

SEQ ID NO: 12123 - protein, 15 aa, synthetic construct
GSSGSSGSSGSSGSS

SEQ ID NO: 12124 - protein, 11 aa, synthetic construct
GGGGSSEAAAK

SEQ ID NO: 12125 - protein, 12 aa, synthetic construct
GGSGGSGGSGGS

SEQ ID NO: 12126 - protein, 11 aa, synthetic construct
PAPEAAAKGGS

SEQ ID NO: 12127 - protein, 30 aa, synthetic construct; identical to SEQ ID NO: 5130

SEQ ID NO: 12128 - protein, 15 aa, synthetic construct
EAAAKGGGGSEAAAK

SEQ ID NO: 12129 - protein, 15 aa, synthetic construct
EAAAKGGGGSEAAAK

SEQ ID NO: 12130 - protein, 11 aa, synthetic construct
EAAAKGGGPAP

SEQ ID NO: 12131 - protein, 25 aa, synthetic construct
EAAAKEAAAKEAAAKEAAAKEAAAK

SEQ ID NO: 12132 - protein, 46 aa, synthetic construct; identical to SEQ ID NO: 5217

SEQ ID NO: 12133 - protein, 11 aa, synthetic construct
GGSEAAAKGGG

SEQ ID NO: 12134 - protein, 30 aa, synthetic construct; identical to SEQ ID NO: 5112

SEQ ID NO: 12135 - protein, 9 aa, synthetic construct
GGGPAPGGS

SEQ ID NO: 12136 - protein, 13 aa, synthetic construct
PAPAPAPAPAPAP

SEQ ID NO: 12137 - protein, 9 aa, synthetic construct
GGSGSSGGG

SEQ ID NO: 12138 - protein, 9 aa, synthetic construct
GGSGSSGGG

SEQ ID NO: 12139 - protein, 11 aa, synthetic construct
GGGEAAAKGGS

SEQ ID NO: 12140 - protein, 5 aa, synthetic construct
EAAAK

SEQ ID NO: 12141 - protein, 9 aa, synthetic construct
GGSPAPGSS

SEQ ID NO: 12142 - protein, 11 aa, synthetic construct
GGGGSSEAAAK

SEQ ID NO: 12143 - protein, 11 aa, synthetic construct
PAPAPAPAPAP

SEQ ID NO: 12144 - protein, 20 aa, synthetic construct
EAAAKEAAAKEAAAKEAAAK

SEQ ID NO: 12145 - protein, 9 aa, synthetic construct
GGGGGSGSS

SEQ ID NO: 12146 - protein, 11 aa, synthetic construct
EAAAKGSSPAP

SEQ ID NO: 12147 - protein, 13 aa, synthetic construct
PAPAPAPAPAPAP

SEQ ID NO: 12148 - protein, 9 aa, synthetic construct
GSSGGGGGS

SEQ ID NO: 12149 - protein, 9 aa, synthetic construct
PAPGSSGGG

SEQ ID NO: 12150 - protein, 9 aa, synthetic construct
GGSGGGPAP

SEQ ID NO: 12151 - protein, 7 aa, synthetic construct
GGGGGGG

SEQ ID NO: 12152 - protein, 18 aa, synthetic construct
GSSGSSGSSGSSGSSGSS

SEQ ID NO: 12153 - protein, 9 aa, synthetic construct
GGGPAPGGS

SEQ ID NO: 12154 - protein, 11 aa, synthetic construct
EAAAKGGSGGG

SEQ ID NO: 12155 - protein, 11 aa, synthetic construct
EAAAKGGGGSS

SEQ ID NO: 12156 - protein, 18 aa, synthetic construct
GSSGSSGSSGSSGSSGSS

SEQ ID NO: 12157 - protein, 20 aa, synthetic construct
GGGGSGGGGSGGGGSGGGGS

SEQ ID NO: 12158 - protein, 11 aa, synthetic construct
PAPAPAPAPAP

SEQ ID NO: 12159 - protein, 11 aa, synthetic construct
GGGEAAAKGGS

SEQ ID NO: 12160 - protein, 46 aa, synthetic construct; identical to SEQ ID NO: 5217

SEQ ID NO: 12161 - protein, 12 aa, synthetic construct
GSAGSAAGSGEF

SEQ ID NO: 12162 - protein, 15 aa, synthetic construct
GSSGSSGSSGSSGSS

SEQ ID NO: 12163 - protein, 11 aa, synthetic construct
EAAAKGGSGSS

SEQ ID NO: 12164 - protein, 6 aa, synthetic construct
PAPGGG

SEQ ID NO: 12165 - protein, 9 aa, synthetic construct
GGGPAPGSS

SEQ ID NO: 12166 - protein, 11 aa, synthetic construct
PAPEAAAKGGS

SEQ ID NO: 12167 - protein, 11 aa, synthetic construct
PAPGGGEAAAK

SEQ ID NO: 12168 - protein, 11 aa, synthetic construct
GGGGSSEAAAK

SEQ ID NO: 12169 - protein, 5 aa, synthetic construct
EAAAK

SEQ ID NO: 12170 - protein, 30 aa, synthetic construct; identical to SEQ ID NO: 5112

SEQ ID NO: 12171 - protein, 11 aa, synthetic construct
GGSGGGEAAAK

SEQ ID NO: 12172 - protein, 46 aa, synthetic construct; identical to SEQ ID NO: 5217

SEQ ID NO: 12173 - protein, 9 aa, synthetic construct
GSSPAPGGS

SEQ ID NO: 12174 - protein, 9 aa, synthetic construct
GGSGGGPAP

SEQ ID NO: 12175 - protein, 5 aa, synthetic construct
EAAAK

SEQ ID NO: 12176 - skipped

SEQ ID NO: 12177 - protein, 9 aa, synthetic construct
GGSGGSGGS

SEQ ID NO: 12178 - protein, 20 aa, synthetic construct
EAAAKEAAAKEAAAKEAAAK

SEQ ID NO: 12179 - protein, 11 aa, synthetic construct
PAPEAAAKGGG

SEQ ID NO: 12180 - protein, 11 aa, synthetic construct
GGGGGSEAAAK

SEQ ID NO: 12181 - protein, 9 aa, synthetic construct
GGSGSSGGG

SEQ ID NO: 12182 - protein, 7 aa, synthetic construct
GGGGGGG

SEQ ID NO: 12183 - protein, 11 aa, synthetic construct
GSSEAAAKPAP

SEQ ID NO: 12184 - protein, 11 aa, synthetic construct
GGGGGSEAAAK

SEQ ID NO: 12185 - protein, 25 aa, synthetic construct
GGGGSGGGGSGGGGSGGGGSGGGGS

SEQ ID NO: 12186 - protein, 11 aa, synthetic construct
GGGEAAAKGGS

SEQ ID NO: 12187 - protein, 9 aa, synthetic construct
GGSPAPGGG

SEQ ID NO: 12188 - protein, 12 aa, synthetic construct
GSAGSAAGSGEF

SEQ ID NO: 12189 - protein, 5 aa, synthetic construct
EAAAK

SEQ ID NO: 12190 - protein, 11 aa, synthetic construct
EAAAKPAPGSS

SEQ ID NO: 12191 - protein, 30 aa, synthetic construct; identical to SEQ ID NO: 5130

SEQ ID NO: 12192 - protein, 11 aa, synthetic construct
GGSEAAAKPAP

SEQ ID NO: 12193 - protein, 13 aa, synthetic construct
PAPAPAPAPAPAP

SEQ ID NO: 12194 - protein, 9 aa, synthetic construct
GGSPAPGGG

SEQ ID NO: 12195 - protein, 11 aa, synthetic construct
GGSEAAAKGGG

SEQ ID NO: 12196 - protein, 12 aa, synthetic construct
GGSGGSGGSGGS

SEQ ID NO: 12197 - protein, 30 aa, synthetic construct; identical to SEQ ID NO: 5130

SEQ ID NO: 12198 - skipped

SEQ ID NO: 12199 - protein, 46 aa, synthetic construct; identical to SEQ ID NO: 5217

SEQ ID NO: 12200 - protein, 12 aa, synthetic construct
GGSGGSGGSGGS

SEQ ID NO: 12201 - protein, 8 aa, synthetic construct
GGGEAAAK

SEQ ID NO: 12202 - protein, 18 aa, synthetic construct
GSSGSSGSSGSSGSSGSS

SEQ ID NO: 12203 - protein, 9 aa, synthetic construct
GSSGGGPAP

SEQ ID NO: 12204 - protein, 11 aa, synthetic construct
GSSEAAAKPAP

SEQ ID NO: 12205 - protein, 10 aa, synthetic construct
EAAAKEAAAK

SEQ ID NO: 12206 - protein, 30 aa, synthetic construct; identical to SEQ ID NO: 5112

SEQ ID NO: 12207 - protein, 6 aa, synthetic construct
GGGGGG

SEQ ID NO: 12208 - protein, 9 aa, synthetic construct
GGSGSSGGG

SEQ ID NO: 12209 - protein, 11 aa, synthetic construct
GSSGGGEAAAK

SEQ ID NO: 12210 - protein, 11 aa, synthetic construct
PAPAPAPAPAP

SEQ ID NO: 12211 - protein, 30 aa, synthetic construct; identical to SEQ ID NO: 5130

SEQ ID NO: 12212 - protein, 11 aa, synthetic construct
EAAAKGGSGGG

SEQ ID NO: 12213 - protein, 9 aa, synthetic construct
GGGGSSPAP

SEQ ID NO: 12214 - protein, 11 aa, synthetic construct
GGGEAAAKPAP

SEQ ID NO: 12215 - protein, 9 aa, synthetic construct
GGSGGGPAP

SEQ ID NO: 12216 - protein, 9 aa, synthetic construct
PAPGSSGGS

SEQ ID NO: 12217 - protein, 9 aa, synthetic construct
GGSGGGPAP

SEQ ID NO: 12218 - protein, 11 aa, synthetic construct
EAAAKGGSPAP

SEQ ID NO: 12219 - protein, 11 aa, synthetic construct
EAAAKGGSGGG

SEQ ID NO: 12220 - protein, 9 aa, synthetic construct
PAPGSSGGG

SEQ ID NO: 12221 - protein, 11 aa, synthetic construct
GSSEAAAKGGS

SEQ ID NO: 12222 - protein, 11 aa, synthetic construct
PAPGSSEAAAK

SEQ ID NO: 12223 - protein, 11 aa, synthetic construct
EAAAKGSSPAP

SEQ ID NO: 12224 - protein, 25 aa, synthetic construct
EAAAKEAAAKEAAAKEAAAKEAAAK

SEQ ID NO: 12225 - protein, 11 aa, synthetic construct
PAPGSSEAAAK

SEQ ID NO: 12226 - protein, 11 aa, synthetic construct
EAAAKGSSGGG

SEQ ID NO: 12227 - protein, 11 aa, synthetic construct
EAAAKGGGGGS

SEQ ID NO: 12228 - protein, 15 aa, synthetic construct
EAAAKEAAAKEAAAK

SEQ ID NO: 12229 - protein, 13 aa, synthetic construct
PAPAPAPAPAPAP

SEQ ID NO: 12230 - protein, 15 aa, synthetic construct
GGGGSGGGGSGGGGS

SEQ ID NO: 12231 - protein, 11 aa, synthetic construct
PAPGGSEAAAK

SEQ ID NO: 12232 - protein, 11 aa, synthetic construct
PAPGSSEAAAK

SEQ ID NO: 12233 - protein, 11 aa, synthetic construct
PAPEAAAKGSS

SEQ ID NO: 12234 - protein, 9 aa, synthetic construct
GGSPAPGSS

SEQ ID NO: 12235 - protein, 9 aa, synthetic construct
PAPGGSGGG

SEQ ID NO: 12236 - protein, 11 aa, synthetic construct
EAAAKGGSGSS

SEQ ID NO: 12237 - protein, 6 aa, synthetic construct
GGSGGG

SEQ ID NO: 12238 - protein, 11 aa, synthetic construct
GGSEAAAKGSS

SEQ ID NO: 12239 - protein, 46 aa, synthetic construct; identical to SEQ ID NO: 5217

SEQ ID NO: 12240 - protein, 13 aa, synthetic construct
PAPAPAPAPAPAP

SEQ ID NO: 12241 - protein, 8 aa, synthetic construct
PAPEAAAK

SEQ ID NO: 12242 - protein, 11 aa, synthetic construct
GGSEAAAKGGG

SEQ ID NO: 12243 - protein, 6 aa, synthetic construct
GSSPAP

SEQ ID NO: 12244 - protein, 6 aa, synthetic construct
GGGGSS

SEQ ID NO: 12245 - protein, 11 aa, synthetic construct
GGGEAAAKPAP

SEQ ID NO: 12246 - protein, 11 aa, synthetic construct
EAAAKPAPGGS

SEQ ID NO: 12247 - protein, 11 aa, synthetic construct
EAAAKGGGPAP

SEQ ID NO: 12248 - protein, 11 aa, synthetic construct
PAPGGSEAAAK

SEQ ID NO: 12249 - protein, 9 aa, synthetic construct
PAPGGSGSS

SEQ ID NO: 12250 - protein, 9 aa, synthetic construct
PAPGGSGSS

SEQ ID NO: 12251 - protein, 9 aa, synthetic construct
GGSGGGPAP

SEQ ID NO: 12252 - protein, 20 aa, synthetic construct
EAAAKEAAAKEAAAKEAAAK

SEQ ID NO: 12253 - protein, 25 aa, synthetic construct
GGGGSGGGGSGGGGSGGGGSGGGGS

SEQ ID NO: 12254 - protein, 9 aa, synthetic construct
GGGGSSPAP

SEQ ID NO: 12255 - protein, 9 aa, synthetic construct
GSSGGGPAP

SEQ ID NO: 12256 - protein, 9 aa, synthetic construct
GGGGSSGGS

SEQ ID NO: 12257 - protein, 6 aa, synthetic construct
GGSGGG

SEQ ID NO: 12258 - protein, 9 aa, synthetic construct
GSSGGGGGS

SEQ ID NO: 12259 - protein, 33 aa, synthetic construct; identical to SEQ ID NO: 5006

SEQ ID NO: 12260 - protein, 9 aa, synthetic construct
GGGGGSGSS

SEQ ID NO: 12261 - protein, 11 aa, synthetic construct
GGGEAAAKGGS

SEQ ID NO: 12262 - protein, 6 aa, synthetic construct
GGSGGG

SEQ ID NO: 12263 - protein, 7 aa, synthetic construct
PAPAPAP

SEQ ID NO: 12264 - protein, 46 aa, synthetic construct; identical to SEQ ID NO: 5217

SEQ ID NO: 12265 - protein, 46 aa, synthetic construct; identical to SEQ ID NO: 5217

SEQ ID NO: 12266 - protein, 15 aa, synthetic construct
GSSGSSGSSGSSGSS

SEQ ID NO: 12267 - protein, 11 aa, synthetic construct
GSSGGGEAAAK

SEQ ID NO: 12268 - protein, 11 aa, synthetic construct
GSSGGSEAAAK

SEQ ID NO: 12269 - skipped

SEQ ID NO: 12270 - protein, 15 aa, synthetic construct
EAAAKGGGGSEAAAK

SEQ ID NO: 12271 - protein, 5 aa, synthetic construct
PAPAP

SEQ ID NO: 12272 - skipped

SEQ ID NO: 12273 - protein, 6 aa, synthetic construct
GSSGGG

SEQ ID NO: 12274 - protein, 9 aa, synthetic construct
GSSPAPGGS

SEQ ID NO: 12275 - protein, 9 aa, synthetic construct
PAPAPAPAP

SEQ ID NO: 12276 - protein, 11 aa, synthetic construct
EAAAKGSSGGS

SEQ ID NO: 12277 - protein, 11 aa, synthetic construct
PAPEAAAKGGG

SEQ ID NO: 12278 - protein, 6 aa, synthetic construct
PAPGGS

SEQ ID NO: 12279 - protein, 8 aa, synthetic construct
EAAAKGGG

SEQ ID NO: 12280 - protein, 11 aa, synthetic construct
GSSEAAAKPAP

SEQ ID NO: 12281 - protein, 6 aa, synthetic construct
PAPGGS

SEQ ID NO: 12282 - protein, 8 aa, synthetic construct
EAAAKGGS

SEQ ID NO: 12283 - protein, 30 aa, synthetic construct; identical to SEQ ID NO: 5130

SEQ ID NO: 12284 - protein, 11 aa, synthetic construct
PAPGGSEAAAK

SEQ ID NO: 12285 - skipped

SEQ ID NO: 12286 - protein, 12 aa, synthetic construct
GSSGSSGSSGSS

SEQ ID NO: 12287 - protein, 9 aa, synthetic construct
GSSGSSGSS

SEQ ID NO: 12288 - protein, 6 aa, synthetic construct
GSSGGG

SEQ ID NO: 12289 - protein, 5 aa, synthetic construct
EAAAK

SEQ ID NO: 12290 - protein, 11 aa, synthetic construct
GGSPAPEAAAK

SEQ ID NO: 12291 - protein, 6 aa, synthetic construct
GGSGSS

SEQ ID NO: 12292 - protein, 9 aa, synthetic construct
GSSPAPGGG

SEQ ID NO: 12293 - protein, 25 aa, synthetic construct
EAAAKEAAAKEAAAKEAAAKEAAAK

SEQ ID NO: 12294 - protein, 11 aa, synthetic construct
EAAAKGSSPAP

SEQ ID NO: 12295 - protein, 6 aa, synthetic construct
GGGGSS

SEQ ID NO: 12296 - protein, 9 aa, synthetic construct
GGSPAPGSS

SEQ ID NO: 12297 - protein, 25 aa, synthetic construct
EAAAKEAAAKEAAAKEAAAKEAAAK

SEQ ID NO: 12298 - protein, 11 aa, synthetic construct
PAPEAAAKGGG

SEQ ID NO: 12299 - protein, 11 aa, synthetic construct
EAAAKPAPGGS

SEQ ID NO: 12300 - protein, 5 aa, synthetic construct
PAPAP

SEQ ID NO: 12301 - protein, 20 aa, synthetic construct
EAAAKEAAAKEAAAKEAAAK

SEQ ID NO: 12302 - protein, 9 aa, synthetic construct
GSSPAPGGG

SEQ ID NO: 12303 - protein, 11 aa, synthetic construct
EAAAKGGGPAP

SEQ ID NO: 12304 - protein, 8 aa, synthetic construct
PAPEAAAK

SEQ ID NO: 12305 - protein, 11 aa, synthetic construct
PAPGGGEAAAK

SEQ ID NO: 12306 - protein, 11 aa, synthetic construct
EAAAKGSSGGS

SEQ ID NO: 12307 - protein, 15 aa, synthetic construct
EAAAKEAAAKEAAAK

SEQ ID NO: 12308 - protein, 8 aa, synthetic construct
GSSEAAAK

SEQ ID NO: 12309 - protein, 12 aa, synthetic construct
GSSGSSGSSGSS

SEQ ID NO: 12310 - protein, 20 aa, synthetic construct
GGGGSGGGGSGGGGSGGGGS

SEQ ID NO: 12311 - protein, 15 aa, synthetic construct
EAAAKGGGGSEAAAK

SEQ ID NO: 12312 - skipped

SEQ ID NO: 12313 - protein, 30 aa, synthetic construct; identical to SEQ ID NO: 5112

SEQ ID NO: 12314 - protein, 9 aa, synthetic construct
GGSGSSPAP

SEQ ID NO: 12315 - protein, 15 aa, synthetic construct
GGGGSGGGGSGGGGS

SEQ ID NO: 12316 - protein, 11 aa, synthetic construct
PAPAPAPAPAP

SEQ ID NO: 12317 - protein, 11 aa, synthetic construct
PAPAPAPAPAP

SEQ ID NO: 12318 - protein, 20 aa, synthetic construct
EAAAKEAAAKEAAAKEAAAK

SEQ ID NO: 12319 - protein, 25 aa, synthetic construct
GGGGSGGGGSGGGGSGGGGSGGGGS

SEQ ID NO: 12320 - protein, 9 aa, synthetic construct
GGSGGSGGS

SEQ ID NO: 12321 - protein, 11 aa, synthetic construct
EAAAKPAPGSS

SEQ ID NO: 12322 - skipped

SEQ ID NO: 12323 - protein, 11 aa, synthetic construct
PAPEAAAKGGS

SEQ ID NO: 12324 - protein, 9 aa, synthetic construct
GGGPAPGGS

SEQ ID NO: 12325 - protein, 11 aa, synthetic construct
EAAAKGGGGSS

SEQ ID NO: 12326 - protein, 15 aa, synthetic construct
GSSGSSGSSGSSGSS

SEQ ID NO: 12327 - protein, 16 aa, synthetic construct
SGSETPGTSESATPES

SEQ ID NO: 12328 - protein, 11 aa, synthetic construct
GGSEAAAKGGG

SEQ ID NO: 12329 - protein, 18 aa, synthetic construct
GSSGSSGSSGSSGSSGSS

SEQ ID NO: 12330 - protein, 13 aa, synthetic construct
PAPAPAPAPAPAP

SEQ ID NO: 12331 - protein, 6 aa, synthetic construct
GGSGGS

SEQ ID NO: 12332 - protein, 11 aa, synthetic construct
PAPGSSEAAAK

SEQ ID NO: 12333 - protein, 11 aa, synthetic construct
GGSPAPEAAAK

SEQ ID NO: 12334 - protein, 11 aa, synthetic construct
EAAAKGGGGGS

SEQ ID NO: 12335 - protein, 12 aa, synthetic construct
GGSGGSGGSGGS

SEQ ID NO: 12336 - protein, 11 aa, synthetic construct
GGGGSSEAAAK

SEQ ID NO: 12337 - protein, 11 aa, synthetic construct
GSSEAAAKGGG

SEQ ID NO: 12338 - protein, 6 aa, synthetic construct
PAPGGS

SEQ ID NO: 12339 - protein, 11 aa, synthetic construct
EAAAKGGSGGG

SEQ ID NO: 12340 - protein, 8 aa, synthetic construct
EAAAKGGG

SEQ ID NO: 12341 - protein, 6 aa, synthetic construct
PAPGGS

SEQ ID NO: 12342 - protein, 9 aa, synthetic construct
GSSPAPGGG

SEQ ID NO: 12343 - protein, 11 aa, synthetic construct
PAPEAAAKGGG

SEQ ID NO: 12344 - protein, 11 aa, synthetic construct
GSSEAAAKGGG

SEQ ID NO: 12345 - protein, 11 aa, synthetic construct
PAPGGSEAAAK

SEQ ID NO: 12346 - protein, 6 aa, synthetic construct
GGGGGS

SEQ ID NO: 12347 - protein, 11 aa, synthetic construct
GGSPAPEAAAK

SEQ ID NO: 12348 - protein, 6 aa, synthetic construct
GGGPAP

SEQ ID NO: 12349 - protein, 9 aa, synthetic construct
PAPGSSGGG

SEQ ID NO: 12350 - protein, 9 aa, synthetic construct
PAPGSSGGG

SEQ ID NO: 12351 - protein, 11 aa, synthetic construct
GGGEAAAKGSS

SEQ ID NO: 12352 - protein, 11 aa, synthetic construct
GSSEAAAKGGS

SEQ ID NO: 12353 - protein, 9 aa, synthetic construct
PAPGGSGSS

SEQ ID NO: 12354 - protein, 15 aa, synthetic construct
EAAAKGGGGSEAAAK

SEQ ID NO: 12355 - protein, 7 aa, synthetic construct
PAPAPAP

SEQ ID NO: 12356 - protein, 6 aa, synthetic construct
GGGGGG

SEQ ID NO: 12357 - protein, 11 aa, synthetic construct
GSSPAPEAAAK

SEQ ID NO: 12358 - protein, 9 aa, synthetic construct
GGSGGSGGS

SEQ ID NO: 12359 - protein, 15 aa, synthetic construct
GSSGSSGSSGSSGSS

SEQ ID NO: 12360 - protein, 9 aa, synthetic construct
GGGPAPGGS

SEQ ID NO: 12361 - protein, 11 aa, synthetic construct
GGGPAPEAAAK

SEQ ID NO: 12362 - protein, 6 aa, synthetic construct
GGSGGG

SEQ ID NO: 12363 - protein, 16 aa, synthetic construct
SGSETPGTSESATPES

SEQ ID NO: 12364 - protein, 11 aa, synthetic construct
EAAAKGSSPAP

SEQ ID NO: 12365 - protein, 8 aa, synthetic construct
GSSEAAAK

SEQ ID NO: 12366 - protein, 9 aa, synthetic construct
GSSGGSGGG

SEQ ID NO: 12367 - protein, 25 aa, synthetic construct
EAAAKEAAAKEAAAKEAAAKEAAAK

SEQ ID NO: 12368 - protein, 15 aa, synthetic construct
GGGGSEAAAKGGGGS

SEQ ID NO: 12369 - protein, 9 aa, synthetic construct
PAPGGGGSS

SEQ ID NO: 12370 - protein, 16 aa, synthetic construct
SGSETPGTSESATPES

SEQ ID NO: 12371 - protein, 11 aa, synthetic construct
GGSPAPEAAAK

SEQ ID NO: 12372 - protein, 11 aa, synthetic construct
GSSEAAAKGGG

SEQ ID NO: 12373 - protein, 8 aa, synthetic construct
GSSEAAAK

SEQ ID NO: 12374 - protein, 15 aa, synthetic construct
GGGGSEAAAKGGGGS

SEQ ID NO: 12375 - skipped

SEQ ID NO: 12376 - protein, 11 aa, synthetic construct
PAPGGSEAAAK

SEQ ID NO: 12377 - protein, 5 aa, synthetic construct
GGGGS

SEQ ID NO: 12378 - protein, 6 aa, synthetic construct
GGGPAP

SEQ ID NO: 12379 - protein, 30 aa, synthetic construct; identical to SEQ ID NO: 5130

SEQ ID NO: 12380 - protein, 11 aa, synthetic construct
EAAAKPAPGSS

SEQ ID NO: 12381 - protein, 11 aa, synthetic construct
EAAAKPAPGSS

SEQ ID NO: 12382 - protein, 6 aa, synthetic construct
GGGGGG

SEQ ID NO: 12383 - protein, 11 aa, synthetic construct
EAAAKPAPGGS

SEQ ID NO: 12384 - protein, 11 aa, synthetic construct
PAPGGGEAAAK

SEQ ID NO: 12385 - protein, 25 aa, synthetic construct
EAAAKEAAAKEAAAKEAAAKEAAAK

SEQ ID NO: 12386 - protein, 11 aa, synthetic construct
GSSEAAAKPAP

SEQ ID NO: 12387 - protein, 11 aa, synthetic construct
PAPGGSEAAAK

SEQ ID NO: 12388 - protein, 6 aa, synthetic construct
PAPGSS

SEQ ID NO: 12389 - protein, 8 aa, synthetic construct
EAAAKGGG

SEQ ID NO: 12390 - protein, 8 aa, synthetic construct
EAAAKPAP

SEQ ID NO: 12391 - protein, 11 aa, synthetic construct
PAPEAAAKGGS

SEQ ID NO: 12392 - protein, 9 aa, synthetic construct
GGSPAPGGG

SEQ ID NO: 12393 - protein, 9 aa, synthetic construct
PAPGGSGSS

SEQ ID NO: 12394 - protein, 30 aa, synthetic construct; identical to SEQ ID NO: 5130

SEQ ID NO: 12395 - protein, 9 aa, synthetic construct
GGSGGGPAP

SEQ ID NO: 12396 - protein, 46 aa, synthetic construct; identical to SEQ ID NO: 5217

SEQ ID NO: 12397 - protein, 11 aa, synthetic construct
PAPEAAAKGSS

SEQ ID NO: 12398 - protein, 8 aa, synthetic construct
EAAAKGSS

SEQ ID NO: 12399 - protein, 6 aa, synthetic construct
GGSGGS

SEQ ID NO: 12400 - protein, 25 aa, synthetic construct
EAAAKEAAAKEAAAKEAAAKEAAAK

SEQ ID NO: 12401 - protein, 15 aa, synthetic construct
GGGGSEAAAKGGGGS

SEQ ID NO: 12402 - protein, 11 aa, synthetic construct
GGSEAAAKGGG

SEQ ID NO: 12403 - protein, 15 aa, synthetic construct
GSSGSSGSSGSSGSS

SEQ ID NO: 12404 - protein, 30 aa, synthetic construct; identical to SEQ ID NO: 5112

SEQ ID NO: 12405 - protein, 8 aa, synthetic construct
EAAAKGGG

SEQ ID NO: 12406 - protein, 11 aa, synthetic construct
GGGGGSEAAAK

SEQ ID NO: 12407 - protein, 11 aa, synthetic construct
EAAAKPAPGGS

SEQ ID NO: 12408 - protein, 9 aa, synthetic construct
GGGGGSGSS

SEQ ID NO: 12409 - protein, 11 aa, synthetic construct
PAPGSSEAAAK

SEQ ID NO: 12410 - protein, 11 aa, synthetic construct
GSSEAAAKPAP

SEQ ID NO: 12411 - protein, 11 aa, synthetic construct
EAAAKGSSPAP

SEQ ID NO: 12412 - protein, 9 aa, synthetic construct
GGGPAPGGS

SEQ ID NO: 12413 - protein, 6 aa, synthetic construct
GGSPAP

SEQ ID NO: 12414 - protein, 11 aa, synthetic construct
GGSEAAAKGGG

SEQ ID NO: 12415 - protein, 8 aa, synthetic construct
GGGGGGGG

SEQ ID NO: 12416 - protein, 30 aa, synthetic construct; identical to SEQ ID NO: 5112

SEQ ID NO: 12417 - protein, 30 aa, synthetic construct; identical to SEQ ID NO: 5112

SEQ ID NO: 12418 - protein, 9 aa, synthetic construct
GSSPAPGGG

SEQ ID NO: 12419 - protein, 6 aa, synthetic construct
GGGGGG

SEQ ID NO: 12420 - protein, 6 aa, synthetic construct
GSSGGS

SEQ ID NO: 12421 - protein, 9 aa, synthetic construct
GGSPAPGSS

SEQ ID NO: 12422 - protein, 11 aa, synthetic construct
PAPEAAAKGGG

SEQ ID NO: 12423 - protein, 11 aa, synthetic construct
EAAAKGGGPAP

SEQ ID NO: 12424 - protein, 11 aa, synthetic construct
GGGEAAAKGGS

SEQ ID NO: 12425 - protein, 9 aa, synthetic construct
GGSGSSPAP

SEQ ID NO: 12426 - protein, 16 aa, synthetic construct
SGSETPGTSESATPES

SEQ ID NO: 12427 - protein, 11 aa, synthetic construct
PAPGGSEAAAK

SEQ ID NO: 12428 - protein, 6 aa, synthetic construct
GGSGGG

SEQ ID NO: 12429 - protein, 9 aa, synthetic construct
GGGGSSPAP

SEQ ID NO: 12430 - protein, 11 aa, synthetic construct
GGGEAAAKGSS

SEQ ID NO: 12431 - protein, 13 aa, synthetic construct
PAPAPAPAPAPAP

SEQ ID NO: 12432 - protein, 15 aa, synthetic construct
EAAAKGGGGSEAAAK

SEQ ID NO: 12433 - protein, 25 aa, synthetic construct
EAAAKEAAAKEAAAKEAAAKEAAAK

SEQ ID NO: 12434 - protein, 11 aa, synthetic construct
GGGGGSEAAAK

SEQ ID NO: 12435 - protein, 11 aa, synthetic construct
PAPGSSEAAAK

SEQ ID NO: 12436 - protein, 12 aa, synthetic construct
GSAGSAAGSGEF

SEQ ID NO: 12437 - protein, 15 aa, synthetic construct
EAAAKGGGGSEAAAK

SEQ ID NO: 12438 - protein, 9 aa, synthetic construct
GGSPAPGGG

SEQ ID NO: 12439 - protein, 11 aa, synthetic construct
GSSEAAAKGGG

SEQ ID NO: 12440 - protein, 11 aa, synthetic construct
GGGEAAAKPAP

SEQ ID NO: 12441 - protein, 6 aa, synthetic construct
GGGPAP

SEQ ID NO: 12442 - protein, 8 aa, synthetic construct
GGSEAAAK

SEQ ID NO: 12443 - protein, 33 aa, synthetic construct; identical to SEQ ID NO: 5006

SEQ ID NO: 12444 - protein, 11 aa, synthetic construct
EAAAKPAPGGS

SEQ ID NO: 12445 - protein, 46 aa, synthetic construct; identical to SEQ ID NO: 5217

SEQ ID NO: 12446 - protein, 8 aa, synthetic construct
GGGGGGGG

SEQ ID NO: 12447 - protein, 6 aa, synthetic construct
PAPGSS

SEQ ID NO: 12448 - protein, 5 aa, synthetic construct
EAAAK

SEQ ID NO: 12449 - protein, 12 aa, synthetic construct
GSAGSAAGSGEF

SEQ ID NO: 12450 - protein, 11 aa, synthetic construct
PAPGGGEAAAK

SEQ ID NO: 12451 - protein, 11 aa, synthetic construct
EAAAKGSSGGS

SEQ ID NO: 12452 - protein, 15 aa, synthetic construct
GGGGSEAAAKGGGGS

SEQ ID NO: 12453 - protein, 15 aa, synthetic construct
GGGGSGGGGSGGGGS

SEQ ID NO: 12454 - protein, 15 aa, synthetic construct
EAAAKGGGGSEAAAK

SEQ ID NO: 12455 - protein, 11 aa, synthetic construct
PAPGGGEAAAK

SEQ ID NO: 12456 - protein, 11 aa, synthetic construct
GGSEAAAKPAP

SEQ ID NO: 12457 - protein, 5 aa, synthetic construct
PAPAP

SEQ ID NO: 12458 - protein, 5 aa, synthetic construct
PAPAP

SEQ ID NO: 12459 - protein, 6 aa, synthetic construct
GGSPAP

SEQ ID NO: 12460 - protein, 11 aa, synthetic construct
EAAAKGSSGGS

SEQ ID NO: 12461 - protein, 9 aa, synthetic construct
PAPGSSGGS

SEQ ID NO: 12462 - protein, 15 aa, synthetic construct
EAAAKGGGGSEAAAK

SEQ ID NO: 12463 - protein, 7 aa, synthetic construct
PAPAPAP

SEQ ID NO: 12464 - protein, 18 aa, synthetic construct
GGSGGSGGSGGSGGSGGS

SEQ ID NO: 12465 - protein, 9 aa, synthetic construct
GGGGGSGSS

SEQ ID NO: 12466 - protein, 11 aa, synthetic construct
PAPGSSEAAAK

SEQ ID NO: 12467 - protein, 11 aa, synthetic construct
GGSEAAAKPAP

SEQ ID NO: 12468 - protein, 20 aa, synthetic construct
EAAAKEAAAKEAAAKEAAAK

SEQ ID NO: 12469 - protein, 46 aa, synthetic construct; identical to SEQ ID NO: 5217

SEQ ID NO: 12470 - protein, 11 aa, synthetic construct
GGSGGGEAAAK

SEQ ID NO: 12471 - protein, 8 aa, synthetic construct
GGGEAAAK

SEQ ID NO: 12472 - protein, 15 aa, synthetic construct
GGGGSGGGGSGGGGS

SEQ ID NO: 12473 - protein, 15 aa, synthetic construct
GGSGGSGGSGGSGGS

SEQ ID NO: 12474 - protein, 9 aa, synthetic construct
GSSGGGGGS

SEQ ID NO: 12475 - protein, 11 aa, synthetic construct
PAPGGSEAAAK

SEQ ID NO: 12476 - protein, 9 aa, synthetic construct
GSSGGSPAP

SEQ ID NO: 12477 - protein, 16 aa, synthetic construct
SGSETPGTSESATPES

SEQ ID NO: 12478 - protein, 10 aa, synthetic construct
GGGGSGGGGS

SEQ ID NO: 12479 - protein, 11 aa, synthetic construct
PAPAPAPAPAP

SEQ ID NO: 12480 - protein, 6 aa, synthetic construct
GSSGSS

SEQ ID NO: 12481 - protein, 11 aa, synthetic construct
GSSEAAAKPAP

SEQ ID NO: 12482 - protein, 9 aa, synthetic construct
GGSGSSGGG

SEQ ID NO: 12483 - protein, 10 aa, synthetic construct
EAAAKEAAAK

SEQ ID NO: 12484 - protein, 12 aa, synthetic construct
GSSGSSGSSGSS

SEQ ID NO: 12485 - protein, 9 aa, synthetic construct
GSSPAPGGG

SEQ ID NO: 12486 - protein, 15 aa, synthetic construct
EAAAKEAAAKEAAAK

SEQ ID NO: 12487 - protein, 46 aa, synthetic construct; identical to SEQ ID NO: 5217

SEQ ID NO: 12488 - protein, 30 aa, synthetic construct; identical to SEQ ID NO: 5112

SEQ ID NO: 12489 - protein, 12 aa, synthetic construct
GSAGSAAGSGEF

SEQ ID NO: 12490 - protein, 11 aa, synthetic construct
PAPGSSEAAAK

SEQ ID NO: 12491 - protein, 8 aa, synthetic construct
GGSEAAAK

SEQ ID NO: 12492 - protein, 15 aa, synthetic construct
GSSGSSGSSGSSGSS

SEQ ID NO: 12493 - protein, 11 aa, synthetic construct
GGSEAAAKPAP

SEQ ID NO: 12494 - protein, 9 aa, synthetic construct
GGSGGSGGS

SEQ ID NO: 12495 - protein, 11 aa, synthetic construct
EAAAKGGSGSS

SEQ ID NO: 12496 - protein, 25 aa, synthetic construct
GGGGSGGGGSGGGGSGGGGSGGGGS

SEQ ID NO: 12497 - protein, 20 aa, synthetic construct
EAAAKEAAAKEAAAKEAAAK

SEQ ID NO: 12498 - protein, 9 aa, synthetic construct
GGSGSSPAP

SEQ ID NO: 12499 - protein, 25 aa, synthetic construct
EAAAKEAAAKEAAAKEAAAKEAAAK

SEQ ID NO: 12500 - protein, 25 aa, synthetic construct
GGGGSGGGGSGGGGSGGGGSGGGGS

SEQ ID NO: 12501 - protein, 6 aa, synthetic construct
GGSGSS

SEQ ID NO: 12502 - protein, 8 aa, synthetic construct
PAPEAAAK

SEQ ID NO: 12503 - protein, 8 aa, synthetic construct
EAAAKPAP

SEQ ID NO: 12504 - protein, 6 aa, synthetic construct
GSSPAP

SEQ ID NO: 12505 - protein, 6 aa, synthetic construct
GGGPAP

SEQ ID NO: 12506 - protein, 11 aa, synthetic construct
EAAAKGGSGSS

SEQ ID NO: 12507 - protein, 15 aa, synthetic construct
EAAAKGGGGSEAAAK

SEQ ID NO: 12508 - protein, 6 aa, synthetic construct
GGSGGG

SEQ ID NO: 12509 - protein, 6 aa, synthetic construct
GSSPAP

SEQ ID NO: 12510 - protein, 11 aa, synthetic construct
GGSGSSEAAAK

SEQ ID NO: 12511 - protein, 9 aa, synthetic construct
PAPGSSGGS

SEQ ID NO: 12512 - protein, 6 aa, synthetic construct
GGGGGG

SEQ ID NO: 12513 - protein, 11 aa, synthetic construct
PAPGGSEAAAK

SEQ ID NO: 12514 - protein, 6 aa, synthetic construct
PAPGGS

SEQ ID NO: 12515 - protein, 12 aa, synthetic construct
GGSGGSGGSGGS

SEQ ID NO: 12516 - protein, 6 aa, synthetic construct
GSSPAP

SEQ ID NO: 12517 - protein, 9 aa, synthetic construct
PAPAPAPAP

SEQ ID NO: 12518 - protein, 6 aa, synthetic construct
GGGGGG

SEQ ID NO: 12519 - protein, 18 aa, synthetic construct
GSSGSSGSSGSSGSSGSS

SEQ ID NO: 12520 - protein, 11 aa, synthetic construct
GSSEAAAKGGS

SEQ ID NO: 12521 - protein, 8 aa, synthetic construct
GGSEAAAK

SEQ ID NO: 12522 - protein, 15 aa, synthetic construct
GGSGGSGGSGGSGGS

SEQ ID NO: 12523 - protein, 11 aa, synthetic construct
GSSPAPEAAAK

SEQ ID NO: 12524 - protein, 15 aa, synthetic construct
GSSGSSGSSGSSGSS

SEQ ID NO: 12525 - protein, 11 aa, synthetic construct
EAAAKPAPGGS

SEQ ID NO: 12526 - protein, 33 aa, synthetic construct; identical to SEQ ID NO: 5006

SEQ ID NO: 12527 - protein, 11 aa, synthetic construct
GGSPAPEAAAK

SEQ ID NO: 12528 - protein, 11 aa, synthetic construct
EAAAKGGSGGG

SEQ ID NO: 12529 - protein, 20 aa, synthetic construct
EAAAKEAAAKEAAAKEAAAK

SEQ ID NO: 12530 - protein, 6 aa, synthetic construct
GSSPAP

SEQ ID NO: 12531 - protein, 9 aa, synthetic construct
PAPAPAPAP

SEQ ID NO: 12532 - protein, 11 aa, synthetic construct
PAPGGSEAAAK

SEQ ID NO: 12533 - protein, 11 aa, synthetic construct
GGSGSSEAAAK

SEQ ID NO: 12534 - protein, 6 aa, synthetic construct
GSSGGG

SEQ ID NO: 12535 - protein, 11 aa, synthetic construct
GGGEAAAKGSS

SEQ ID NO: 12536 - protein, 9 aa, synthetic construct
PAPGGSGGG

SEQ ID NO: 12537 - protein, 46 aa, synthetic construct; identical to SEQ ID NO: 5217

SEQ ID NO: 12538 - protein, 9 aa, synthetic construct
PAPGGGGSS

SEQ ID NO: 12539 - protein, 8 aa, synthetic construct
EAAAKGGS

SEQ ID NO: 12540 - protein, 30 aa, synthetic construct; identical to SEQ ID NO: 5130

SEQ ID NO: 12541 - protein, 9 aa, synthetic construct
GGSGGSGGS

SEQ ID NO: 12542 - protein, 5 aa, synthetic construct
PAPAP

SEQ ID NO: 12543 - protein, 11 aa, synthetic construct
GSSGGGEAAAK

SEQ ID NO: 12544 - protein, 11 aa, synthetic construct
GGGGSSEAAAK

SEQ ID NO: 12545 - protein, 11 aa, synthetic construct
EAAAKGSSGGS

SEQ ID NO: 12546 - protein, 15 aa, synthetic construct
EAAAKGGGGSEAAAK

SEQ ID NO: 12547 - protein, 8 aa, synthetic construct
GGGGGGGG

SEQ ID NO: 12548 - protein, 9 aa, synthetic construct
GSSGSSGSS

SEQ ID NO: 12549 - protein, 11 aa, synthetic construct
GGGEAAAKPAP

SEQ ID NO: 12550 - protein, 9 aa, synthetic construct
GGGGGSGSS

SEQ ID NO: 12551 - protein, 7 aa, synthetic construct
GGGGGGG

SEQ ID NO: 12552 - skipped

SEQ ID NO: 12553 - protein, 6 aa, synthetic construct
GSSGGG

SEQ ID NO: 12554 - protein, 11 aa, synthetic construct
EAAAKGGSGSS

SEQ ID NO: 12555 - protein, 11 aa, synthetic construct
PAPGSSEAAAK

SEQ ID NO: 12556 - protein, 11 aa, synthetic construct
GSSEAAAKPAP

SEQ ID NO: 12557 - protein, 9 aa, synthetic construct
GGSPAPGSS

SEQ ID NO: 12558 - protein, 12 aa, synthetic construct
GSAGSAAGSGEF

SEQ ID NO: 12559 - protein, 9 aa, synthetic construct
GGSPAPGGG

SEQ ID NO: 12560 - protein, 20 aa, synthetic construct
GGGGSGGGGSGGGGSGGGGS

SEQ ID NO: 12561 - protein, 9 aa, synthetic construct
GSSGSSGSS

SEQ ID NO: 12562 - protein, 30 aa, synthetic construct; identical to SEQ ID NO: 5130

SEQ ID NO: 12563 - protein, 15 aa, synthetic construct
GGGGSEAAAKGGGGS

SEQ ID NO: 12564 - protein, 11 aa, synthetic construct
GGSEAAAKGSS

SEQ ID NO: 12565 - protein, 15 aa, synthetic construct
EAAAKGGGGSEAAAK

SEQ ID NO: 12566 - protein, 30 aa, synthetic construct; identical to SEQ ID NO: 5130

SEQ ID NO: 12567 - protein, 11 aa, synthetic construct
PAPGGGEAAAK

SEQ ID NO: 12568 - protein, 11 aa, synthetic construct
GSSGGGEAAAK

SEQ ID NO: 12569 - protein, 6 aa, synthetic construct
GSSGSS

SEQ ID NO: 12570 - protein, 13 aa, synthetic construct
PAPAPAPAPAPAP

SEQ ID NO: 12571 - protein, 9 aa, synthetic construct
GGSPAPGGG

SEQ ID NO: 12572 - protein, 15 aa, synthetic construct
GGSGGSGGSGGSGGS

SEQ ID NO: 12573 - protein, 10 aa, synthetic construct
EAAAKEAAAK

SEQ ID NO: 12574 - protein, 46 aa, synthetic construct; identical to SEQ ID NO: 5217

SEQ ID NO: 12575 - protein, 13 aa, synthetic construct
PAPAPAPAPAPAP

SEQ ID NO: 12576 - protein, 11 aa, synthetic construct
GGGEAAAKGGS

SEQ ID NO: 12577 - protein, 11 aa, synthetic construct
EAAAKGGGPAP

SEQ ID NO: 12578 - protein, 11 aa, synthetic construct
PAPEAAAKGSS

SEQ ID NO: 12579 - protein, 11 aa, synthetic construct
PAPEAAAKGSS

SEQ ID NO: 12580 - protein, 11 aa, synthetic construct
PAPGGSEAAAK

SEQ ID NO: 12581 - protein, 9 aa, synthetic construct
GSSPAPGGG

SEQ ID NO: 12582 - protein, 11 aa, synthetic construct
GGGEAAAKPAP

SEQ ID NO: 12583 - protein, 10 aa, synthetic construct
GGGGSGGGGS

SEQ ID NO: 12584 - protein, 11 aa, synthetic construct
GGGEAAAKGSS

SEQ ID NO: 12585 - protein, 9 aa, synthetic construct
PAPGGGGSS

SEQ ID NO: 12586 - protein, 8 aa, synthetic construct
GSSEAAAK

SEQ ID NO: 12587 - protein, 8 aa, synthetic construct
GGGGGGGG

SEQ ID NO: 12588 - protein, 9 aa, synthetic construct
PAPGSSGGS

SEQ ID NO: 12589 - protein, 20 aa, synthetic construct
GGGGSGGGGSGGGGSGGGGS

SEQ ID NO: 12590 - skipped

SEQ ID NO: 12591 - protein, 11 aa, synthetic construct
EAAAKGSSPAP

SEQ ID NO: 12592 - protein, 11 aa, synthetic construct
PAPEAAAKGGS

SEQ ID NO: 12593 - protein, 11 aa, synthetic construct
GSSGGGEAAAK

SEQ ID NO: 12594 - protein, 7 aa, synthetic construct
PAPAPAP

SEQ ID NO: 12595 - protein, 11 aa, synthetic construct
GGSEAAAKGGG

SEQ ID NO: 12596 - protein, 8 aa, synthetic construct
GSSEAAAK

SEQ ID NO: 12597 - protein, 4 aa, synthetic construct
GGGG

SEQ ID NO: 12598 - protein, 6 aa, synthetic construct
GGGGGS

SEQ ID NO: 12599 - protein, 11 aa, synthetic construct
GGGGSSEAAAK

SEQ ID NO: 12600 - protein, 30 aa, synthetic construct; identical to SEQ ID NO: 5130

SEQ ID NO: 12601 - protein, 11 aa, synthetic construct
GGSEAAAKGSS

SEQ ID NO: 12602 - protein, 9 aa, synthetic construct
PAPGSSGGS

SEQ ID NO: 12603 - protein, 6 aa, synthetic construct
GGSPAP

SEQ ID NO: 12604 - protein, 11 aa, synthetic construct
GGGGSSEAAAK

SEQ ID NO: 12605 - protein, 12 aa, synthetic construct
GGSGGSGGSGGS

SEQ ID NO: 12606 - protein, 9 aa, synthetic construct
PAPGSSGGS

SEQ ID NO: 12607 - protein, 9 aa, synthetic construct
GSSPAPGGG

SEQ ID NO: 12608 - protein, 7 aa, synthetic construct
GGGGGGG

SEQ ID NO: 12609 - protein, 11 aa, synthetic construct
EAAAKGGGGGS

SEQ ID NO: 12610 - protein, 11 aa, synthetic construct
EAAAKGGSGGG

SEQ ID NO: 12611 - protein, 11 aa, synthetic construct
GGGGSSEAAAK

SEQ ID NO: 12612 - protein, 15 aa, synthetic construct
GGGGSEAAAKGGGGS

SEQ ID NO: 12613 - protein, 6 aa, synthetic construct
GSSGSS

SEQ ID NO: 12614 - protein, 6 aa, synthetic construct
GGSGGG

SEQ ID NO: 12615 - protein, 11 aa, synthetic construct
PAPEAAAKGGG

SEQ ID NO: 12616 - protein, 46 aa, synthetic construct; identical to SEQ ID NO: 5217

SEQ ID NO: 12617 - protein, 9 aa, synthetic construct
GGGGGSGSS

SEQ ID NO: 12618 - protein, 15 aa, synthetic construct
GSSGSSGSSGSSGSS

SEQ ID NO: 12619 - protein, 15 aa, synthetic construct
GGGGSEAAAKGGGGS

SEQ ID NO: 12620 - protein, 9 aa, synthetic construct
GGGGGSPAP

SEQ ID NO: 12621 - protein, 8 aa, synthetic construct
GGGEAAAK

SEQ ID NO: 12622 - protein, 12 aa, synthetic construct
GGSGGSGGSGGS

SEQ ID NO: 12623 - skipped

SEQ ID NO: 12624 - protein, 11 aa, synthetic construct
GGSPAPEAAAK

SEQ ID NO: 12625 - protein, 10 aa, synthetic construct
EAAAKEAAAK

SEQ ID NO: 12626 - protein, 11 aa, synthetic construct
GGGEAAAKPAP

SEQ ID NO: 12627 - protein, 11 aa, synthetic construct
GGGEAAAKGGS

SEQ ID NO: 12628 - protein, 9 aa, synthetic construct
GGSGGSGGS

SEQ ID NO: 12629 - protein, 11 aa, synthetic construct
EAAAKGGGPAP

SEQ ID NO: 12630 - protein, 5 aa, synthetic construct
EAAAK

SEQ ID NO: 12631 - protein, 11 aa, synthetic construct
PAPEAAAKGGG

SEQ ID NO: 12632 - protein, 8 aa, synthetic construct
EAAAKGSS

SEQ ID NO: 12633 - protein, 11 aa, synthetic construct
GGSEAAAKGGG

SEQ ID NO: 12634 - protein, 20 aa, synthetic construct
GGGGSGGGGSGGGGSGGGGS

SEQ ID NO: 12635 - protein, 25 aa, synthetic construct
GGGGSGGGGSGGGGSGGGGSGGGGS

SEQ ID NO: 12636 - protein, 9 aa, synthetic construct
GGGGSSPAP

SEQ ID NO: 12637 - protein, 18 aa, synthetic construct
GGSGGSGGSGGSGGSGGS

SEQ ID NO: 12638 - protein, 11 aa, synthetic construct
GGGEAAAKPAP

SEQ ID NO: 12639 - protein, 10 aa, synthetic construct
EAAAKEAAAK

SEQ ID NO: 12640 - protein, 11 aa, synthetic construct
GGSGSSEAAAK

SEQ ID NO: 12641 - protein, 11 aa, synthetic construct
PAPEAAAKGSS

SEQ ID NO: 12642 - protein, 11 aa, synthetic construct
PAPAPAPAPAP

SEQ ID NO: 12643 - protein, 11 aa, synthetic construct
GSSGGGEAAAK

SEQ ID NO: 12644 - protein, 9 aa, synthetic construct
GSSPAPGGG

SEQ ID NO: 12645 - protein, 11 aa, synthetic construct
GGSPAPEAAAK

SEQ ID NO: 12646 - protein, 11 aa, synthetic construct
PAPGGSEAAAK

SEQ ID NO: 12647 - protein, 6 aa, synthetic construct
GGGGSS

SEQ ID NO: 12648 - protein, 9 aa, synthetic construct
GGSGSSGGG

SEQ ID NO: 12649 - protein, 11 aa, synthetic construct
GSSGGGEAAAK

SEQ ID NO: 12650 - protein, 8 aa, synthetic construct
EAAAKGGS

SEQ ID NO: 12651 - protein, 9 aa, synthetic construct
GGGPAPGGS

SEQ ID NO: 12652 - protein, 10 aa, synthetic construct
EAAAKEAAAK

SEQ ID NO: 12653 - protein, 9 aa, synthetic construct
GSSGSSGSS

SEQ ID NO: 12654 - protein, 11 aa, synthetic construct
GGGEAAAKPAP

SEQ ID NO: 12655 - protein, 16 aa, synthetic construct
SGSETPGTSESATPES

SEQ ID NO: 12656 - protein, 11 aa, synthetic construct
PAPAPAPAPAP

SEQ ID NO: 12657 - protein, 46 aa, synthetic construct; identical to SEQ ID NO: 5217

SEQ ID NO: 12658 - protein, 9 aa, synthetic construct
PAPGSSGGG

SEQ ID NO: 12659 - protein, 11 aa, synthetic construct
GSSGGGEAAAK

SEQ ID NO: 12660 - protein, 25 aa, synthetic construct
GGGGSGGGGSGGGGSGGGGSGGGGS

SEQ ID NO: 12661 - protein, 9 aa, synthetic construct
GGGGSSPAP

SEQ ID NO: 12662 - protein, 9 aa, synthetic construct
GGSGGGPAP

SEQ ID NO: 12663 - skipped

SEQ ID NO: 12664 - protein, 11 aa, synthetic construct
EAAAKGSSPAP

SEQ ID NO: 12665 - protein, 8 aa, synthetic construct
EAAAKGGG

SEQ ID NO: 12666 - protein, 12 aa, synthetic construct
GSSGSSGSSGSS

SEQ ID NO: 12667 - protein, 11 aa, synthetic construct
PAPEAAAKGSS

SEQ ID NO: 12668 - protein, 8 aa, synthetic construct
GSSEAAAK

SEQ ID NO: 12669 - protein, 11 aa, synthetic construct
EAAAKGGSGSS

SEQ ID NO: 12670 - protein, 8 aa, synthetic construct
GSSEAAAK

SEQ ID NO: 12671 - protein, 11 aa, synthetic construct
GGSGSSEAAAK

SEQ ID NO: 12672 - protein, 11 aa, synthetic construct
GGSEAAAKGGG

SEQ ID NO: 12673 - protein, 20 aa, synthetic construct
GGGGSGGGGSGGGGSGGGGS

SEQ ID NO: 12674 - protein, 13 aa, synthetic construct
PAPAPAPAPAPAP

SEQ ID NO: 12675 - protein, 11 aa, synthetic construct
EAAAKPAPGSS

SEQ ID NO: 12676 - protein, 11 aa, synthetic construct
PAPGSSEAAAK

SEQ ID NO: 12677 - protein, 9 aa, synthetic construct
GGGGSSPAP

SEQ ID NO: 12678 - protein, 11 aa, synthetic construct
EAAAKGGGGGS

SEQ ID NO: 12679 - protein, 11 aa, synthetic construct
GGGEAAAKGGS

SEQ ID NO: 12680 - protein, 9 aa, synthetic construct
GGSGSSGGG

SEQ ID NO: 12681 - protein, 9 aa, synthetic construct
GGGPAPGGS

SEQ ID NO: 12682 - protein, 9 aa, synthetic construct
PAPGGGGGS

SEQ ID NO: 12683 - protein, 9 aa, synthetic construct
GGGPAPGSS

SEQ ID NO: 12684 - protein, 7 aa, synthetic construct
GGGGGGG

SEQ ID NO: 12685 - protein, 9 aa, synthetic construct
GGSGGGGSS

SEQ ID NO: 12686 - protein, 6 aa, synthetic construct
GGGGGG

SEQ ID NO: 12687 - protein, 11 aa, synthetic construct
GGSEAAAKGSS

SEQ ID NO: 12688 - protein, 9 aa, synthetic construct
GGSPAPGGG

SEQ ID NO: 12689 - protein, 9 aa, synthetic construct
GGSPAPGSS

SEQ ID NO: 12690 - protein, 12 aa, synthetic construct
GGSGGSGGSGGS

SEQ ID NO: 12691 - protein, 25 aa, synthetic construct
EAAAKEAAAKEAAAKEAAAKEAAAK

SEQ ID NO: 12692 - protein, 9 aa, synthetic construct
PAPGSSGGS

SEQ ID NO: 12693 - protein, 11 aa, synthetic construct
EAAAKGGGGSS

SEQ ID NO: 12694 - protein, 15 aa, synthetic construct
GGSGGSGGSGGSGGS

SEQ ID NO: 12695 - protein, 9 aa, synthetic construct
PAPGGSGGG

SEQ ID NO: 12696 - protein, 9 aa, synthetic construct
PAPGSSGGG

SEQ ID NO: 12697 - protein, 6 aa, synthetic construct
GSSGSS

SEQ ID NO: 12698 - protein, 8 aa, synthetic construct
EAAAKGSS

SEQ ID NO: 12699 - protein, 6 aa, synthetic construct
GGGPAP

SEQ ID NO: 12700 - protein, 11 aa, synthetic construct
EAAAKGGGGGS

SEQ ID NO: 12701 - protein, 11 aa, synthetic construct
EAAAKGGSPAP

SEQ ID NO: 12702 - protein, 30 aa, synthetic construct; identical to SEQ ID NO: 5130

SEQ ID NO: 12703 - protein, 9 aa, synthetic construct
GSSPAPGGG

SEQ ID NO: 12704 - protein, 11 aa, synthetic construct
GGGEAAAKGSS

SEQ ID NO: 12705 - protein, 11 aa, synthetic construct
GGGGSSEAAAK

SEQ ID NO: 12706 - protein, 8 aa, synthetic construct
GGGGGGGG

SEQ ID NO: 12707 - protein, 11 aa, synthetic construct
PAPGSSEAAAK

SEQ ID NO: 12708 - protein, 8 aa, synthetic construct
EAAAKGSS

SEQ ID NO: 12709 - protein, 11 aa, synthetic construct
GSSEAAAKGGG

SEQ ID NO: 12710 - protein, 8 aa, synthetic construct
GGSEAAAK

SEQ ID NO: 12711 - protein, 11 aa, synthetic construct
GSSEAAAKGGG

SEQ ID NO: 12712 - protein, 9 aa, synthetic construct
PAPGGSGGG

SEQ ID NO: 12713 - protein, 9 aa, synthetic construct
GSSGGSGGG

SEQ ID NO: 12714 - protein, 11 aa, synthetic construct
EAAAKGSSGGG

SEQ ID NO: 12715 - protein, 8 aa, synthetic construct
GSSEAAAK

SEQ ID NO: 12716 - protein, 11 aa, synthetic construct
GSSGGGEAAAK

SEQ ID NO: 12717 - protein, 10 aa, synthetic construct
GGGGSGGGGS

SEQ ID NO: 12718 - protein, 15 aa, synthetic construct
EAAAKGGGGSEAAAK

SEQ ID NO: 12719 - protein, 8 aa, synthetic construct
EAAAKGGG

SEQ ID NO: 12720 - protein, 11 aa, synthetic construct
EAAAKGGSPAP

SEQ ID NO: 12721 - protein, 9 aa, synthetic construct
GGGPAPGGS

SEQ ID NO: 12722 - protein, 8 aa, synthetic construct
GSSEAAAK

SEQ ID NO: 12723 - protein, 11 aa, synthetic construct
GSSGGGEAAAK

SEQ ID NO: 12724 - protein, 16 aa, synthetic construct
SGSETPGTSESATPES

SEQ ID NO: 12725 - protein, 9 aa, synthetic construct
GGSGSSPAP

SEQ ID NO: 12726 - protein, 6 aa, synthetic construct
GGGGGG

SEQ ID NO: 12727 - protein, 9 aa, synthetic construct
GGSPAPGGG

SEQ ID NO: 12728 - protein, 6 aa, synthetic construct
GGSGSS

SEQ ID NO: 12729 - skipped

SEQ ID NO: 12730 - protein, 11 aa, synthetic construct
EAAAKPAPGSS

SEQ ID NO: 12731 - protein, 8 aa, synthetic construct
EAAAKGGG

SEQ ID NO: 12732 - protein, 11 aa, synthetic construct
GSSEAAAKPAP

SEQ ID NO: 12733 - protein, 6 aa, synthetic construct
GGGGSS

SEQ ID NO: 12734 - protein, 11 aa, synthetic construct
GGSGSSEAAAK

SEQ ID NO: 12735 - protein, 6 aa, synthetic construct
GGGGSS

SEQ ID NO: 12736 - protein, 5 aa, synthetic construct
PAPAP

SEQ ID NO: 12737 - protein, 11 aa, synthetic construct
PAPEAAAKGGG

SEQ ID NO: 12738 - protein, 8 aa, synthetic construct
EAAAKGGS

SEQ ID NO: 12739 - protein, 13 aa, synthetic construct
PAPAPAPAPAPAP

SEQ ID NO: 12740 - protein, 11 aa, synthetic construct
GGGGGSEAAAK

SEQ ID NO: 12741 - protein, 6 aa, synthetic construct
PAPGGS

SEQ ID NO: 12742 - protein, 6 aa, synthetic construct
GGGGSS

SEQ ID NO: 12743 - protein, 5 aa, synthetic construct
GGGGS

SEQ ID NO: 12744 - protein, 11 aa, synthetic construct
GSSPAPEAAAK

SEQ ID NO: 12745 - protein, 9 aa, synthetic construct
GGGGSSGGS

SEQ ID NO: 12746 - protein, 11 aa, synthetic construct
PAPEAAAKGSS

SEQ ID NO: 12747 - protein, 11 aa, synthetic construct
GGSGSSEAAAK

SEQ ID NO: 12748 - protein, 8 aa, synthetic construct
EAAAKGGG

SEQ ID NO: 12749 - protein, 11 aa, synthetic construct
PAPGSSEAAAK

SEQ ID NO: 12750 - protein, 11 aa, synthetic construct
EAAAKGSSGGG

SEQ ID NO: 12751 - protein, 8 aa, synthetic construct
PAPEAAAK

SEQ ID NO: 12752 - protein, 11 aa, synthetic construct
GGSPAPEAAAK

SEQ ID NO: 12753 - protein, 18 aa, synthetic construct
GGSGGSGGSGGSGGSGGS

SEQ ID NO: 12754 - protein, 11 aa, synthetic construct
GSSEAAAKPAP

SEQ ID NO: 12755 - protein, 46 aa, synthetic construct; identical to SEQ ID NO: 5217

SEQ ID NO: 12756 - protein, 11 aa, synthetic construct
GSSGGGEAAAK

SEQ ID NO: 12757 - protein, 9 aa, synthetic construct
PAPGGSGGG

SEQ ID NO: 12758 - protein, 11 aa, synthetic construct
PAPGGSEAAAK

SEQ ID NO: 12759 - protein, 5 aa, synthetic construct
GGGGS

SEQ ID NO: 12760 - protein, 15 aa, synthetic construct
GGGGSGGGGSGGGGS

SEQ ID NO: 12761 - protein, 11 aa, synthetic construct
PAPAPAPAPAP

SEQ ID NO: 12762 - protein, 25 aa, synthetic construct
EAAAKEAAAKEAAAKEAAAKEAAAK

SEQ ID NO: 12763 - protein, 11 aa, synthetic construct
GSSGGSEAAAK

SEQ ID NO: 12764 - protein, 12 aa, synthetic construct
GGSGGSGGSGGS

SEQ ID NO: 12765 - protein, 11 aa, synthetic construct
EAAAKGSSGGG

SEQ ID NO: 12766 - protein, 8 aa, synthetic construct
EAAAKGGG

SEQ ID NO: 12767 - protein, 16 aa, synthetic construct
SGSETPGTSESATPES

SEQ ID NO: 12768 - protein, 9 aa, synthetic construct
PAPGSSGGS

SEQ ID NO: 12769 - protein, 11 aa, synthetic construct
PAPEAAAKGSS

SEQ ID NO: 12770 - protein, 8 aa, synthetic construct
PAPEAAAK

SEQ ID NO: 12771 - protein, 11 aa, synthetic construct
GSSEAAAKGGG

SEQ ID NO: 12772 - protein, 6 aa, synthetic construct
GSSPAP

SEQ ID NO: 12773 - protein, 20 aa, synthetic construct
EAAAKEAAAKEAAAKEAAAK

SEQ ID NO: 12774 - protein, 9 aa, synthetic construct
PAPGGSGSS

SEQ ID NO: 12775 - protein, 15 aa, synthetic construct
GGGGSGGGGSGGGGS

SEQ ID NO: 12776 - protein, 11 aa, synthetic construct
GSSGGSEAAAK

SEQ ID NO: 12777 - protein, 8 aa, synthetic construct
EAAAKGGS

SEQ ID NO: 12778 - protein, 8 aa, synthetic construct
EAAAKGGS

SEQ ID NO: 12779 - protein, 6 aa, synthetic construct
GGSPAP

SEQ ID NO: 12780 - protein, 6 aa, synthetic construct
GGSGSS

SEQ ID NO: 12781 - protein, 16 aa, synthetic construct
SGSETPGTSESATPES

SEQ ID NO: 12782 - protein, 7 aa, synthetic construct
GGGGGGG

SEQ ID NO: 12783 - protein, 9 aa, synthetic construct
GGSPAPGSS

SEQ ID NO: 12784 - protein, 9 aa, synthetic construct
GGGGSSGGS

SEQ ID NO: 12785 - protein, 6 aa, synthetic construct
PAPGGS

SEQ ID NO: 12786 - protein, 9 aa, synthetic construct
PAPGSSGGS

SEQ ID NO: 12787 - protein, 25 aa, synthetic construct
EAAAKEAAAKEAAAKEAAAKEAAAK

SEQ ID NO: 12788 - protein, 33 aa, synthetic construct; identical to SEQ ID NO: 5006

SEQ ID NO: 12789 - protein, 15 aa, synthetic construct
GGSGGSGGSGGSGGS

SEQ ID NO: 12790 - protein, 8 aa, synthetic construct
GSSEAAAK

SEQ ID NO: 12791 - protein, 20 aa, synthetic construct
EAAAKEAAAKEAAAKEAAAK

SEQ ID NO: 12792 - protein, 15 aa, synthetic construct
GGSGGSGGSGGSGGS

SEQ ID NO: 12793 - protein, 13 aa, synthetic construct
PAPAPAPAPAPAP

SEQ ID NO: 12794 - protein, 11 aa, synthetic construct
GGSPAPEAAAK

SEQ ID NO: 12795 - protein, 5 aa, synthetic construct
EAAAK

SEQ ID NO: 12796 - protein, 11 aa, synthetic construct
EAAAKGSSGGS

SEQ ID NO: 12797 - protein, 9 aa, synthetic construct
GGSGGGGSS

SEQ ID NO: 12798 - protein, 11 aa, synthetic construct
GGGEAAAKPAP

SEQ ID NO: 12799 - protein, 11 aa, synthetic construct
EAAAKGGSGGG

SEQ ID NO: 12800 - protein, 11 aa, synthetic construct
GGGGGSEAAAK

SEQ ID NO: 12801 - protein, 6 aa, synthetic construct
GGGGGG

SEQ ID NO: 12802 - protein, 6 aa, synthetic construct
GGGGGG

SEQ ID NO: 12803 - protein, 7 aa, synthetic construct
GGGGGGG

SEQ ID NO: 12804 - protein, 46 aa, synthetic construct; identical to SEQ ID NO: 5217

SEQ ID NO: 12805 - protein, 9 aa, synthetic construct
PAPGSSGGS

SEQ ID NO: 12806 - protein, 6 aa, synthetic construct
GGGGGS

SEQ ID NO: 12807 - protein, 8 aa, synthetic construct
EAAAKPAP

SEQ ID NO: 12808 - skipped

SEQ ID NO: 12809 - protein, 46 aa, synthetic construct; identical to SEQ ID NO: 5217

SEQ ID NO: 12810 - protein, 11 aa, synthetic construct
EAAAKGSSPAP

SEQ ID NO: 12811 - protein, 16 aa, synthetic construct
SGSETPGTSESATPES

SEQ ID NO: 12812 - protein, 11 aa, synthetic construct
GGSPAPEAAAK

SEQ ID NO: 12813 - protein, 12 aa, synthetic construct
GSSGSSGSSGSS

SEQ ID NO: 12814 - protein, 46 aa, synthetic construct; identical to SEQ ID NO: 5217

SEQ ID NO: 12815 - protein, 6 aa, synthetic construct
GGSPAP

SEQ ID NO: 12816 - protein, 11 aa, synthetic construct
GGGGGSEAAAK

SEQ ID NO: 12817 - protein, 5 aa, synthetic construct
GGGGG

SEQ ID NO: 12818 - protein, 8 aa, synthetic construct
GSSEAAAK

SEQ ID NO: 12819 - skipped

SEQ ID NO: 12820 - protein, 11 aa, synthetic construct
EAAAKGGSPAP

SEQ ID NO: 12821 - protein, 9 aa, synthetic construct
PAPAPAPAP

SEQ ID NO: 12822 - protein, 11 aa, synthetic construct
PAPGGGEAAAK

SEQ ID NO: 12823 - protein, 11 aa, synthetic construct
GGGGSSEAAAK

SEQ ID NO: 12824 - protein, 5 aa, synthetic construct
GGGGG

SEQ ID NO: 12825 - protein, 18 aa, synthetic construct
GGSGGSGGSGGSGGSGGS

SEQ ID NO: 12826 - protein, 5 aa, synthetic construct
GGGGG

SEQ ID NO: 12827 - protein, 11 aa, synthetic construct
PAPEAAAKGGG

SEQ ID NO: 12828 - protein, 9 aa, synthetic construct
GSSGGGPAP

SEQ ID NO: 12829 - protein, 18 aa, synthetic construct
GSSGSSGSSGSSGSSGSS

SEQ ID NO: 12830 - protein, 11 aa, synthetic construct
EAAAKGGSPAP

SEQ ID NO: 12831 - protein, 11 aa, synthetic construct
GSSGGSEAAAK

SEQ ID NO: 12832 - skipped

SEQ ID NO: 12833 - protein, 8 aa, synthetic construct
EAAAKGGS

SEQ ID NO: 12834 - protein, 9 aa, synthetic construct
GGGGGSPAP

SEQ ID NO: 12835 - protein, 8 aa, synthetic construct
EAAAKGSS

SEQ ID NO: 12836 - protein, 11 aa, synthetic construct
EAAAKGGGGSS

SEQ ID NO: 12837 - protein, 9 aa, synthetic construct
PAPGSSGGG

SEQ ID NO: 12838 - protein, 11 aa, synthetic construct
GGGGSSEAAAK

SEQ ID NO: 12839 - protein, 7 aa, synthetic construct
PAPAPAP

SEQ ID NO: 12840 - protein, 11 aa, synthetic construct
GSSGGSEAAAK

SEQ ID NO: 12841 - protein, 11 aa, synthetic construct
PAPEAAAKGSS

SEQ ID NO: 12842 - protein, 15 aa, synthetic construct
GGSGGSGGSGGSGGS

SEQ ID NO: 12843 - protein, 9 aa, synthetic construct
GGSGSSPAP

SEQ ID NO: 12844 - protein, 9 aa, synthetic construct
GGGGSSPAP

SEQ ID NO: 12845 - protein, 5 aa, synthetic construct
GGGGS

SEQ ID NO: 12846 - protein, 20 aa, synthetic construct
EAAAKEAAAKEAAAKEAAAK

SEQ ID NO: 12847 - protein, 10 aa, synthetic construct
EAAAKEAAAK

SEQ ID NO: 12848 - protein, 11 aa, synthetic construct
PAPGGGEAAAK

SEQ ID NO: 12849 - protein, 11 aa, synthetic construct
GSSGGSEAAAK

SEQ ID NO: 12850 - protein, 30 aa, synthetic construct; identical to SEQ ID NO: 5130

SEQ ID NO: 12851 - protein, 11 aa, synthetic construct
GSSEAAAKPAP

SEQ ID NO: 12852 - protein, 11 aa, synthetic construct
EAAAKPAPGSS

SEQ ID NO: 12853 - protein, 9 aa, synthetic construct
GSSGGSPAP

SEQ ID NO: 12854 - protein, 11 aa, synthetic construct
GSSEAAAKGGG

SEQ ID NO: 12855 - protein, 11 aa, synthetic construct
GGGEAAAKGGS

SEQ ID NO: 12856 - protein, 11 aa, synthetic construct
GSSEAAAKGGG

SEQ ID NO: 12857 - protein, 7 aa, synthetic construct
PAPAPAP

SEQ ID NO: 12858 - protein, 11 aa, synthetic construct
EAAAKGGSPAP

SEQ ID NO: 12859 - protein, 11 aa, synthetic construct
PAPGGSEAAAK

SEQ ID NO: 12860 - protein, 5 aa, synthetic construct
GGGGS

SEQ ID NO: 12861 - protein, 11 aa, synthetic construct
EAAAKGSSGGG

SEQ ID NO: 12862 - protein, 11 aa, synthetic construct
EAAAKGGGPAP

SEQ ID NO: 12863 - protein, 8 aa, synthetic construct
EAAAKGSS

SEQ ID NO: 12864 - protein, 9 aa, synthetic construct
GGSPAPGGG

SEQ ID NO: 12865 - protein, 15 aa, synthetic construct
GGGGSEAAAKGGGGS

SEQ ID NO: 12866 - protein, 11 aa, synthetic construct
GGGEAAAKGGS

SEQ ID NO: 12867 - protein, 11 aa, synthetic construct
EAAAKGGGGSS

SEQ ID NO: 12868 - protein, 11 aa, synthetic construct
EAAAKGGGPAP

SEQ ID NO: 12869 - protein, 6 aa, synthetic construct
GSSPAP

SEQ ID NO: 12870 - protein, 8 aa, synthetic construct
EAAAKGGS

SEQ ID NO: 12871 - protein, 6 aa, synthetic construct
GGGGSS

SEQ ID NO: 12872 - protein, 11 aa, synthetic construct
EAAAKGSSPAP

SEQ ID NO: 12873 - protein, 6 aa, synthetic construct
GGGPAP

SEQ ID NO: 12874 - protein, 11 aa, synthetic construct
EAAAKGSSGGS

SEQ ID NO: 12875 - protein, 6 aa, synthetic construct
PAPGGG

SEQ ID NO: 12876 - protein, 11 aa, synthetic construct
GSSPAPEAAAK

SEQ ID NO: 12877 - protein, 6 aa, synthetic construct
GGGPAP

SEQ ID NO: 12878 - protein, 9 aa, synthetic construct
GSSGGGGGS

SEQ ID NO: 12879 - protein, 16 aa, synthetic construct
SGSETPGTSESATPES

SEQ ID NO: 12880 - protein, 6 aa, synthetic construct
GGGPAP

SEQ ID NO: 12881 - protein, 11 aa, synthetic construct
EAAAKGGGGSS

SEQ ID NO: 12882 - protein, 9 aa, synthetic construct
GGGGSSPAP

SEQ ID NO: 12883 - protein, 15 aa, synthetic construct
GGGGSEAAAKGGGGS

SEQ ID NO: 12884 - protein, 6 aa, synthetic construct
GSSPAP

SEQ ID NO: 12885 - protein, 11 aa, synthetic construct
GGSGSSEAAAK

SEQ ID NO: 12886 - protein, 16 aa, synthetic construct
SGSETPGTSESATPES

SEQ ID NO: 12887 - protein, 6 aa, synthetic construct
PAPGGG

SEQ ID NO: 12888 - protein, 11 aa, synthetic construct
GGGEAAAKPAP

SEQ ID NO: 12889 - protein, 11 aa, synthetic construct
EAAAKGGSGSS

SEQ ID NO: 12890 - protein, 9 aa, synthetic construct
GGSPAPGGG

SEQ ID NO: 12891 - protein, 9 aa, synthetic construct
PAPGGSGSS

SEQ ID NO: 12892 - protein, 9 aa, synthetic construct
GSSGGSPAP

SEQ ID NO: 12893 - protein, 11 aa, synthetic construct
EAAAKGSSGGG

SEQ ID NO: 12894 - protein, 10 aa, synthetic construct
GGGGSGGGGS

SEQ ID NO: 12895 - protein, 9 aa, synthetic construct
GSSGGGGGS

SEQ ID NO: 12896 - protein, 9 aa, synthetic construct
GGGGSSGGS

SEQ ID NO: 12897 - protein, 8 aa, synthetic construct
EAAAKGGS

SEQ ID NO: 12898 - protein, 12 aa, synthetic construct
GSSGSSGSSGSS

SEQ ID NO: 12899 - skipped

SEQ ID NO: 12900 - protein, 11 aa, synthetic construct
GSSGGSEAAAK

SEQ ID NO: 12901 - protein, 33 aa, synthetic construct; identical to SEQ ID NO: 5006

SEQ ID NO: 12902 - protein, 5 aa, synthetic construct
GGGGG

SEQ ID NO: 12903 - protein, 11 aa, synthetic construct
PAPEAAAKGSS

SEQ ID NO: 12904 - protein, 6 aa, synthetic construct
GGGGGG

SEQ ID NO: 12905 - protein, 8 aa, synthetic construct
EAAAKGGG

SEQ ID NO: 12906 - protein, 6 aa, synthetic construct
GGGGSS

SEQ ID NO: 12907 - protein, 11 aa, synthetic construct
GSSGGGEAAAK

SEQ ID NO: 12908 - protein, 6 aa, synthetic construct
GGSGSS

SEQ ID NO: 12909 - protein, 8 aa, synthetic construct
EAAAKPAP

SEQ ID NO: 12910 - protein, 15 aa, synthetic construct
EAAAKEAAAKEAAAK

SEQ ID NO: 12911 - protein, 4 aa, synthetic construct
GGGG

SEQ ID NO: 12912 - protein, 9 aa, synthetic construct
GSSPAPGGS

SEQ ID NO: 12913 - protein, 9 aa, synthetic construct
GSSGGGGGS

SEQ ID NO: 12914 - protein, 9 aa, synthetic construct
GGGGSSGGS

SEQ ID NO: 12915 - skipped

SEQ ID NO: 12916 - protein, 5 aa, synthetic construct
GGGGG

SEQ ID NO: 12917 - protein, 18 aa, synthetic construct
GSSGSSGSSGSSGSSGSS

SEQ ID NO: 12918 - protein, 9 aa, synthetic construct
PAPGGGGSS

SEQ ID NO: 12919 - protein, 8 aa, synthetic construct
GGGGGGGG

SEQ ID NO: 12920 - protein, 16 aa, synthetic construct
SGSETPGTSESATPES

SEQ ID NO: 12921 - protein, 6 aa, synthetic construct
PAPGGG

SEQ ID NO: 12922 - protein, 9 aa, synthetic construct
GSSGSSGSS

SEQ ID NO: 12923 - protein, 6 aa, synthetic construct
GGSGSS

SEQ ID NO: 12924 - protein, 15 aa, synthetic construct
EAAAKGGGGSEAAAK

SEQ ID NO: 12925 - protein, 8 aa, synthetic construct
GGGGGGGG

SEQ ID NO: 12926 - protein, 6 aa, synthetic construct
GSSGSS

SEQ ID NO: 12927 - protein, 11 aa, synthetic construct
PAPEAAAKGGS

SEQ ID NO: 12928 - protein, 10 aa, synthetic construct
EAAAKEAAAK

SEQ ID NO: 12929 - protein, 15 aa, synthetic construct
GGGGSGGGGSGGGGS

SEQ ID NO: 12930 - protein, 11 aa, synthetic construct
EAAAKGSSPAP

SEQ ID NO: 12931 - protein, 11 aa, synthetic construct
GGGGSSEAAAK

SEQ ID NO: 12932 - protein, 11 aa, synthetic construct
GGGGSSEAAAK

SEQ ID NO: 12933 - protein, 9 aa, synthetic construct
PAPGGSGSS

SEQ ID NO: 12934 - protein, 11 aa, synthetic construct
GGSGGGEAAAK

SEQ ID NO: 12935 - protein, 11 aa, synthetic construct
PAPEAAAKGGS

SEQ ID NO: 12936 - protein, 9 aa, synthetic construct
GGGPAPGSS

SEQ ID NO: 12937 - protein, 9 aa, synthetic construct
PAPGGSGGG

SEQ ID NO: 12938 - protein, 8 aa, synthetic construct
GGGGGGGG

SEQ ID NO: 12939 - protein, 8 aa, synthetic construct
GSSEAAAK

SEQ ID NO: 12940 - protein, 15 aa, synthetic construct
GGGGSGGGGSGGGGS

SEQ ID NO: 12941 - protein, 8 aa, synthetic construct
EAAAKGGS

SEQ ID NO: 12942 - protein, 9 aa, synthetic construct
GGGGGSGSS

SEQ ID NO: 12943 - protein, 6 aa, synthetic construct
GGGPAP

SEQ ID NO: 12944 - protein, 11 aa, synthetic construct
EAAAKPAPGGG

SEQ ID NO: 12945 - protein, 9 aa, synthetic construct
GSSGGSPAP

SEQ ID NO: 12946 - protein, 33 aa, synthetic construct; identical to SEQ ID NO: 5006

SEQ ID NO: 12947 - protein, 9 aa, synthetic construct
PAPAPAPAP

SEQ ID NO: 12948 - protein, 6 aa, synthetic construct
GSSGGS

SEQ ID NO: 12949 - protein, 11 aa, synthetic construct
GSSEAAAKGGG

SEQ ID NO: 12950 - protein, 9 aa, synthetic construct
GGSGSSPAP

SEQ ID NO: 12951 - protein, 11 aa, synthetic construct
GSSEAAAKGGS

SEQ ID NO: 12952 - protein, 25 aa, synthetic construct
EAAAKEAAAKEAAAKEAAAKEAAAK

SEQ ID NO: 12953 - protein, 9 aa, synthetic construct
PAPGGGGSS

SEQ ID NO: 12954 - protein, 8 aa, synthetic construct
EAAAKGSS

SEQ ID NO: 12955 - protein, 46 aa, synthetic construct; identical to SEQ ID NO: 5217

SEQ ID NO: 12956 - protein, 18 aa, synthetic construct
GGSGGSGGSGGSGGSGGS

SEQ ID NO: 12957 - protein, 6 aa, synthetic construct
GGGGGG

SEQ ID NO: 12958 - protein, 8 aa, synthetic construct
PAPEAAAK

SEQ ID NO: 12959 - protein, 11 aa, synthetic construct
GGSGSSEAAAK

SEQ ID NO: 12960 - skipped

SEQ ID NO: 12961 - protein, 5 aa, synthetic construct
GGGGG

SEQ ID NO: 12962 - protein, 12 aa, synthetic construct
GGSGGSGGSGGS

SEQ ID NO: 12963 - protein, 18 aa, synthetic construct
GSSGSSGSSGSSGSSGSS

SEQ ID NO: 12964 - protein, 11 aa, synthetic construct
GSSEAAAKPAP

SEQ ID NO: 12965 - protein, 11 aa, synthetic construct
GGGEAAAKPAP

SEQ ID NO: 12966 - protein, 9 aa, synthetic construct
GSSGSSGSS

SEQ ID NO: 12967 - protein, 9 aa, synthetic construct
PAPAPAPAP

SEQ ID NO: 12968 - protein, 8 aa, synthetic construct
EAAAKGGG

SEQ ID NO: 12969 - protein, 13 aa, synthetic construct
PAPAPAPAPAPAP

SEQ ID NO: 12970 - protein, 11 aa, synthetic construct
EAAAKGGSGSS

SEQ ID NO: 12971 - protein, 6 aa, synthetic construct
GGGGGG

SEQ ID NO: 12972 - protein, 6 aa, synthetic construct
PAPGGG

SEQ ID NO: 12973 - protein, 9 aa, synthetic construct
GGGGGSGSS

SEQ ID NO: 12974 - protein, 20 aa, synthetic construct
GGGGSGGGGSGGGGSGGGGS

SEQ ID NO: 12975 - protein, 9 aa, synthetic construct
GGSGGSGGS

SEQ ID NO: 12976 - protein, 11 aa, synthetic construct
EAAAKPAPGGG

SEQ ID NO: 12977 - protein, 46 aa, synthetic construct; identical to SEQ ID NO: 5217

SEQ ID NO: 12978 - protein, 30 aa, synthetic construct; identical to SEQ ID NO: 5112

SEQ ID NO: 12979 - protein, 15 aa, synthetic construct
EAAAKGGGGSEAAAK

SEQ ID NO: 12980 - protein, 9 aa, synthetic construct
GGGPAPGSS

SEQ ID NO: 12981 - protein, 5 aa, synthetic construct
GGGGG

SEQ ID NO: 12982 - protein, 30 aa, synthetic construct; identical to SEQ ID NO: 5112

SEQ ID NO: 12983 - protein, 10 aa, synthetic construct
GGGGSGGGGS

SEQ ID NO: 12984 - protein, 11 aa, synthetic construct
EAAAKGGSPAP

SEQ ID NO: 12985 - protein, 11 aa, synthetic construct
EAAAKGSSPAP

SEQ ID NO: 12986 - protein, 9 aa, synthetic construct
PAPGGSGSS

SEQ ID NO: 12987-12988 - skipped (2 entries)

SEQ ID NO: 12989 - protein, 9 aa, synthetic construct
GGGPAPGSS

SEQ ID NO: 12990 - protein, 8 aa, synthetic construct
EAAAKPAP

SEQ ID NO: 12991 - protein, 11 aa, synthetic construct
GSSPAPEAAAK

SEQ ID NO: 12992 - protein, 9 aa, synthetic construct
GGSPAPGSS

SEQ ID NO: 12993 - protein, 11 aa, synthetic construct
GGGGGSEAAAK

SEQ ID NO: 12994 - protein, 11 aa, synthetic construct
PAPEAAAKGGG

SEQ ID NO: 12995 - protein, 6 aa, synthetic construct
PAPGGG

SEQ ID NO: 12996 - protein, 11 aa, synthetic construct
GGSPAPEAAAK

SEQ ID NO: 12997 - protein, 9 aa, synthetic construct
GGSGGGGSS

SEQ ID NO: 12998 - protein, 11 aa, synthetic construct
EAAAKGGGGSS

SEQ ID NO: 12999 - protein, 11 aa, synthetic construct
EAAAKGGSPAP

SEQ ID NO: 13000 - protein, 9 aa, synthetic construct
GGSGGGGSS

SEQ ID NO: 13001 - protein, 11 aa, synthetic construct
PAPGSSEAAAK

SEQ ID NO: 13002 - protein, 8 aa, synthetic construct
GSSEAAAK

SEQ ID NO: 13003 - protein, 12 aa, synthetic construct
GSAGSAAGSGEF

SEQ ID NO: 13004 - protein, 11 aa, synthetic construct
EAAAKGGSGSS

SEQ ID NO: 13005 - protein, 11 aa, synthetic construct
GGSEAAAKPAP

SEQ ID NO: 13006 - protein, 25 aa, synthetic construct
GGGGSGGGGSGGGGSGGGGSGGGGS

SEQ ID NO: 13007 - protein, 11 aa, synthetic construct
PAPGSSEAAAK

SEQ ID NO: 13008 - protein, 9 aa, synthetic construct
GGGGSSPAP

SEQ ID NO: 13009 - protein, 7 aa, synthetic construct
PAPAPAP

SEQ ID NO: 13010 - protein, 11 aa, synthetic construct
EAAAKPAPGGG

SEQ ID NO: 13011 - protein, 9 aa, synthetic construct
GGGPAPGSS

SEQ ID NO: 13012 - skipped

SEQ ID NO: 13013 - protein, 9 aa, synthetic construct
PAPGGSGGG

SEQ ID NO: 13014 - protein, 15 aa, synthetic construct
GGSGGSGGSGGSGGS

SEQ ID NO: 13015 - protein, 9 aa, synthetic construct
PAPAPAPAP

SEQ ID NO: 13016 - protein, 9 aa, synthetic construct
GSSPAPGGG

SEQ ID NO: 13017 - protein, 9 aa, synthetic construct
GSSPAPGGG

SEQ ID NO: 13018 - protein, 6 aa, synthetic construct
PAPGGG

SEQ ID NO: 13019 - protein, 11 aa, synthetic construct
GGGEAAAKGSS

SEQ ID NO: 13020 - protein, 8 aa, synthetic construct
EAAAKGSS

SEQ ID NO: 13021 - protein, 8 aa, synthetic construct
EAAAKGGS

SEQ ID NO: 13022 - protein, 25 aa, synthetic construct
EAAAKEAAAKEAAAKEAAAKEAAAK

SEQ ID NO: 13023 - protein, 11 aa, synthetic construct
PAPEAAAKGGG

SEQ ID NO: 13024 - protein, 11 aa, synthetic construct
EAAAKGSSGGG

SEQ ID NO: 13025 - protein, 46 aa, synthetic construct; identical to SEQ ID NO: 5217

SEQ ID NO: 13026 - protein, 30 aa, synthetic construct; identical to SEQ ID NO: 5130

SEQ ID NO: 13027 - protein, 9 aa, synthetic construct
GSSGGSGGG

SEQ ID NO: 13028 - protein, 12 aa, synthetic construct
GSSGSSGSSGSS

SEQ ID NO: 13029 - protein, 9 aa, synthetic construct
GGSPAPGGG

SEQ ID NO: 13030 - skipped

SEQ ID NO: 13031 - protein, 9 aa, synthetic construct
GGGPAPGSS

SEQ ID NO: 13032 - protein, 6 aa, synthetic construct
GGGGSS

SEQ ID NO: 13033 - protein, 9 aa, synthetic construct
GSSGGSGGG

SEQ ID NO: 13034 - protein, 15 aa, synthetic construct
EAAAKEAAAKEAAAK

SEQ ID NO: 13035 - protein, 33 aa, synthetic construct; identical to SEQ ID NO: 5006

SEQ ID NO: 13036 - protein, 9 aa, synthetic construct
PAPGGGGGS

SEQ ID NO: 13037 - protein, 11 aa, synthetic construct
PAPAPAPAPAP

SEQ ID NO: 13038 - protein, 5 aa, synthetic construct
EAAAK

SEQ ID NO: 13039 - skipped

SEQ ID NO: 13040 - protein, 11 aa, synthetic construct
GGSEAAAKGGG

SEQ ID NO: 13041 - protein, 9 aa, synthetic construct
GGGGGSGSS

SEQ ID NO: 13042 - protein, 11 aa, synthetic construct
EAAAKGSSPAP

SEQ ID NO: 13043 - protein, 9 aa, synthetic construct
GGSGGSGGS

SEQ ID NO: 13044 - protein, 11 aa, synthetic construct
EAAAKPAPGGG

SEQ ID NO: 13045 - protein, 11 aa, synthetic construct
GGGPAPEAAAK

SEQ ID NO: 13046 - protein, 11 aa, synthetic construct
GGSPAPEAAAK

SEQ ID NO: 13047 - protein, 15 aa, synthetic construct
GGSGGSGGSGGSGGS

SEQ ID NO: 13048 - protein, 11 aa, synthetic construct
EAAAKGGSGSS

SEQ ID NO: 13049 - protein, 11 aa, synthetic construct
GGGEAAAKGGS

SEQ ID NO: 13050 - protein, 9 aa, synthetic construct
PAPAPAPAP

SEQ ID NO: 13051 - protein, 20 aa, synthetic construct
EAAAKEAAAKEAAAKEAAAK

SEQ ID NO: 13052 - protein, 8 aa, synthetic construct
EAAAKPAP

SEQ ID NO: 13053 - protein, 10 aa, synthetic construct
EAAAKEAAAK

SEQ ID NO: 13054 - protein, 8 aa, synthetic construct
EAAAKGGG

SEQ ID NO: 13055 - protein, 8 aa, synthetic construct
EAAAKGSS

SEQ ID NO: 13056 - protein, 30 aa, synthetic construct; identical to SEQ ID NO: 5130

SEQ ID NO: 13057 - protein, 9 aa, synthetic construct
GGGPAPGSS

SEQ ID NO: 13058 - protein, 4 aa, synthetic construct
GGGG

SEQ ID NO: 13059 - protein, 11 aa, synthetic construct
EAAAKGGSGSS

SEQ ID NO: 13060 - protein, 15 aa, synthetic construct
GGGGSGGGGSGGGGS

SEQ ID NO: 13061 - protein, 5 aa, synthetic construct
EAAAK

SEQ ID NO: 13062 - protein, 6 aa, synthetic construct
GGGGSS

SEQ ID NO: 13063 - protein, 11 aa, synthetic construct
PAPEAAAKGGS

SEQ ID NO: 13064 - skipped

SEQ ID NO: 13065 - protein, 12 aa, synthetic construct
GSAGSAAGSGEF

SEQ ID NO: 13066 - protein, 30 aa, synthetic construct; identical to SEQ ID NO: 5130

SEQ ID NO: 13067 - protein, 10 aa, synthetic construct
GGGGSGGGGS

SEQ ID NO: 13068 - protein, 5 aa, synthetic construct
EAAAK

SEQ ID NO: 13069 - protein, 9 aa, synthetic construct
GGGPAPGGS

SEQ ID NO: 13070 - protein, 15 aa, synthetic construct
GGGGSGGGGSGGGGS

SEQ ID NO: 13071 - protein, 6 aa, synthetic construct
PAPGGG

SEQ ID NO: 13072 - protein, 11 aa, synthetic construct
GGGEAAAKPAP

SEQ ID NO: 13073 - protein, 11 aa, synthetic construct
EAAAKPAPGSS

SEQ ID NO: 13074 - protein, 6 aa, synthetic construct
PAPGSS

SEQ ID NO: 13075 - protein, 12 aa, synthetic construct
GSAGSAAGSGEF

SEQ ID NO: 13076 - protein, 9 aa, synthetic construct
PAPGGGGSS

SEQ ID NO: 13077 - protein, 11 aa, synthetic construct
GSSGGGEAAAK

SEQ ID NO: 13078 - skipped

SEQ ID NO: 13079 - protein, 12 aa, synthetic construct
GSSGSSGSSGSS

SEQ ID NO: 13080 - protein, 11 aa, synthetic construct
PAPEAAAKGGG

SEQ ID NO: 13081 - protein, 11 aa, synthetic construct
GGGPAPEAAAK

SEQ ID NO: 13082 - protein, 9 aa, synthetic construct
PAPGGGGGS

SEQ ID NO: 13083 - protein, 20 aa, synthetic construct
EAAAKEAAAKEAAAKEAAAK

SEQ ID NO: 13084 - protein, 9 aa, synthetic construct
GGGGGSPAP

SEQ ID NO: 13085 - protein, 15 aa, synthetic construct
GSSGSSGSSGSSGSS

SEQ ID NO: 13086 - protein, 11 aa, synthetic construct
GSSPAPEAAAK

SEQ ID NO: 13087 - protein, 18 aa, synthetic construct
GSSGSSGSSGSSGSSGSS

SEQ ID NO: 13088 - protein, 18 aa, synthetic construct
GSSGSSGSSGSSGSSGSS

SEQ ID NO: 13089 - protein, 11 aa, synthetic construct
GGSPAPEAAAK

SEQ ID NO: 13090 - protein, 6 aa, synthetic construct
GSSGGG

SEQ ID NO: 13091 - protein, 11 aa, synthetic construct
EAAAKGSSGGS

SEQ ID NO: 13092 - protein, 11 aa, synthetic construct
GGSGSSEAAAK

SEQ ID NO: 13093 - protein, 11 aa, synthetic construct
GGGPAPEAAAK

SEQ ID NO: 13094 - protein, 9 aa, synthetic construct
GGGPAPGGS

SEQ ID NO: 13095 - protein, 5 aa, synthetic construct
GGGGG

SEQ ID NO: 13096 - protein, 11 aa, synthetic construct
GGGEAAAKPAP

SEQ ID NO: 13097 - protein, 10 aa, synthetic construct
GGGGSGGGGS

SEQ ID NO: 13098 - protein, 11 aa, synthetic construct
GGGPAPEAAAK

SEQ ID NO: 13099 - protein, 11 aa, synthetic construct
GGSGSSEAAAK

SEQ ID NO: 13100 - protein, 11 aa, synthetic construct
EAAAKGGGPAP

SEQ ID NO: 13101 - protein, 15 aa, synthetic construct
GSSGSSGSSGSSGSS

SEQ ID NO: 13102 - protein, 5 aa, synthetic construct
PAPAP

SEQ ID NO: 13103 - protein, 9 aa, synthetic construct
GGSPAPGSS

SEQ ID NO: 13104 - protein, 9 aa, synthetic construct
GGSGGGPAP

SEQ ID NO: 13105 - protein, 6 aa, synthetic construct
GGSPAP

SEQ ID NO: 13106 - protein, 11 aa, synthetic construct
EAAAKGGSPAP

SEQ ID NO: 13107 - protein, 9 aa, synthetic construct
GSSPAPGGG

SEQ ID NO: 13108 - protein, 12 aa, synthetic construct
GSAGSAAGSGEF

SEQ ID NO: 13109 - protein, 6 aa, synthetic construct
GGSPAP

SEQ ID NO: 13110 - protein, 6 aa, synthetic construct
GSSGSS

SEQ ID NO: 13111 - protein, 9 aa, synthetic construct
GGGPAPGSS

SEQ ID NO: 13112 - protein, 46 aa, synthetic construct; identical to SEQ ID NO: 5217

SEQ ID NO: 13113 - protein, 9 aa, synthetic construct
PAPGSSGGG

SEQ ID NO: 13114 - protein, 11 aa, synthetic construct
GGSEAAAKPAP

SEQ ID NO: 13115 - protein, 6 aa, synthetic construct
GGGGGS

SEQ ID NO: 13116 - protein, 11 aa, synthetic construct
PAPEAAAKGGS

SEQ ID NO: 13117 - protein, 30 aa, synthetic construct; identical to SEQ ID NO: 5130

SEQ ID NO: 13118 - protein, 8 aa, synthetic construct
GGSEAAAK

SEQ ID NO: 13119 - protein, 11 aa, synthetic construct
GSSPAPEAAAK

SEQ ID NO: 13120 - protein, 6 aa, synthetic construct
PAPGGG

SEQ ID NO: 13121 - protein, 8 aa, synthetic construct
EAAAKPAP

SEQ ID NO: 13122 - protein, 15 aa, synthetic construct
GSSGSSGSSGSSGSS

SEQ ID NO: 13123 - protein, 6 aa, synthetic construct
PAPGGG

SEQ ID NO: 13124 - protein, 11 aa, synthetic construct
GGSGGGEAAAK

SEQ ID NO: 13125 - protein, 6 aa, synthetic construct
PAPGGS

SEQ ID NO: 13126 - protein, 12 aa, synthetic construct
GGSGGSGGSGGS

SEQ ID NO: 13127 - protein, 20 aa, synthetic construct
EAAAKEAAAKEAAAKEAAAK

SEQ ID NO: 13128 - protein, 11 aa, synthetic construct
GGSEAAAKGGG

SEQ ID NO: 13129 - protein, 6 aa, synthetic construct
GGGPAP

SEQ ID NO: 13130 - protein, 30 aa, synthetic construct; identical to SEQ ID NO: 5112

SEQ ID NO: 13131 - protein, 9 aa, synthetic construct
GGSPAPGSS

SEQ ID NO: 13132 - protein, 9 aa, synthetic construct
GGGPAPGSS

SEQ ID NO: 13133 - protein, 9 aa, synthetic construct
GGGGSSGGS

SEQ ID NO: 13134 - protein, 11 aa, synthetic construct
GGGEAAAKGSS

SEQ ID NO: 13135 - protein, 5 aa, synthetic construct
PAPAP

SEQ ID NO: 13136 - protein, 9 aa, synthetic construct
GGSPAPGGG

SEQ ID NO: 13137 - protein, 6 aa, synthetic construct
PAPGSS

SEQ ID NO: 13138 - protein, 9 aa, synthetic construct
GSSGGSPAP

SEQ ID NO: 13139 - protein, 15 aa, synthetic construct
EAAAKGGGGSEAAAK

SEQ ID NO: 13140 - protein, 11 aa, synthetic construct
GSSEAAAKGGS

SEQ ID NO: 13141 - protein, 9 aa, synthetic construct
PAPAPAPAP

SEQ ID NO: 13142 - protein, 11 aa, synthetic construct
GGSEAAAKPAP

SEQ ID NO: 13143 - protein, 6 aa, synthetic construct
PAPGGS

SEQ ID NO: 13144 - protein, 11 aa, synthetic construct
EAAAKGGGPAP

SEQ ID NO: 13145 - protein, 9 aa, synthetic construct
GGSGSSGGG

SEQ ID NO: 13146 - protein, 11 aa, synthetic construct
EAAAKGGSGSS

SEQ ID NO: 13147 - protein, 33 aa, synthetic construct; identical to SEQ ID NO: 5006

SEQ ID NO: 13148 - protein, 11 aa, synthetic construct
GSSEAAAKGGS

SEQ ID NO: 13149 - protein, 5 aa, synthetic construct
GGGGG

SEQ ID NO: 13150 - protein, 30 aa, synthetic construct; identical to SEQ ID NO: 5112

SEQ ID NO: 13151 - protein, 11 aa, synthetic construct
GGGEAAAKGSS

SEQ ID NO: 13152 - protein, 15 aa, synthetic construct
EAAAKGGGGSEAAAK

SEQ ID NO: 13153 - protein, 8 aa, synthetic construct
EAAAKGGG

SEQ ID NO: 13154 - protein, 6 aa, synthetic construct
GGSGGG

SEQ ID NO: 13155 - protein, 9 aa, synthetic construct
GGSGSSGGG

SEQ ID NO: 13156 - protein, 30 aa, synthetic construct; identical to SEQ ID NO: 5112

SEQ ID NO: 13157 - protein, 15 aa, synthetic construct
GGGGSEAAAKGGGGS

SEQ ID NO: 13158 - protein, 11 aa, synthetic construct
PAPAPAPAPAP

SEQ ID NO: 13159 - skipped

SEQ ID NO: 13160 - protein, 11 aa, synthetic construct
GGGGGSEAAAK

SEQ ID NO: 13161 - protein, 15 aa, synthetic construct
GSSGSSGSSGSSGSS

SEQ ID NO: 13162 - protein, 25 aa, synthetic construct
EAAAKEAAAKEAAAKEAAAKEAAAK

SEQ ID NO: 13163 - protein, 9 aa, synthetic construct
GGSGSSGGG

SEQ ID NO: 13164 - skipped

SEQ ID NO: 13165 - protein, 11 aa, synthetic construct
GSSPAPEAAAK

SEQ ID NO: 13166 - protein, 11 aa, synthetic construct
EAAAKGGGGSS

SEQ ID NO: 13167 - protein, 11 aa, synthetic construct
GGGEAAAKGGS

SEQ ID NO: 13168 - protein, 9 aa, synthetic construct
GGSGGGPAP

SEQ ID NO: 13169 - protein, 12 aa, synthetic construct
GSAGSAAGSGEF

SEQ ID NO: 13170 - protein, 8 aa, synthetic construct
GSSEAAAK

SEQ ID NO: 13171 - protein, 6 aa, synthetic construct
PAPGSS

SEQ ID NO: 13172 - protein, 15 aa, synthetic construct
EAAAKEAAAKEAAAK

SEQ ID NO: 13173 - protein, 12 aa, synthetic construct
GSAGSAAGSGEF

SEQ ID NO: 13174 - protein, 12 aa, synthetic construct
GSSGSSGSSGSS

SEQ ID NO: 13175 - protein, 46 aa, synthetic construct; identical to SEQ ID NO: 5217

SEQ ID NO: 13176 - protein, 11 aa, synthetic construct
GGGGSSEAAAK

SEQ ID NO: 13177 - protein, 11 aa, synthetic construct
GSSGGGEAAAK

SEQ ID NO: 13178 - protein, 8 aa, synthetic construct
EAAAKPAP

SEQ ID NO: 13179 - protein, 9 aa, synthetic construct
GGSPAPGGG

SEQ ID NO: 13180 - protein, 8 aa, synthetic construct
PAPEAAAK

SEQ ID NO: 13181 - protein, 9 aa, synthetic construct
GSSGSSGSS

SEQ ID NO: 13182 - protein, 11 aa, synthetic construct
GSSGGGEAAAK

SEQ ID NO: 13183 - protein, 6 aa, synthetic construct
GGSPAP

SEQ ID NO: 13184 - protein, 12 aa, synthetic construct
GSAGSAAGSGEF

SEQ ID NO: 13185 - protein, 11 aa, synthetic construct
PAPGGSEAAAK

SEQ ID NO: 13186 - protein, 11 aa, synthetic construct
GGSPAPEAAAK

SEQ ID NO: 13187 - protein, 9 aa, synthetic construct
GGGGGSPAP

SEQ ID NO: 13188 - protein, 11 aa, synthetic construct
EAAAKGSSPAP

SEQ ID NO: 13189 - protein, 11 aa, synthetic construct
EAAAKGGGPAP

SEQ ID NO: 13190 - protein, 6 aa, synthetic construct
PAPGSS

SEQ ID NO: 13191 - protein, 9 aa, synthetic construct
GGSGSSGGG

SEQ ID NO: 13192 - protein, 33 aa, synthetic construct; identical to SEQ ID NO: 5006

SEQ ID NO: 13193 - protein, 18 aa, synthetic construct
GGSGGSGGSGGSGGSGGS

SEQ ID NO: 13194 - protein, 9 aa, synthetic construct
GGSGGSGGS

SEQ ID NO: 13195 - protein, 5 aa, synthetic construct
GGGGG

SEQ ID NO: 13196 - protein, 6 aa, synthetic construct
GGGPAP

SEQ ID NO: 13197 - protein, 9 aa, synthetic construct
PAPGGSGGG

SEQ ID NO: 13198 - protein, 15 aa, synthetic construct
GGGGSEAAAKGGGGS

SEQ ID NO: 13199 - protein, 11 aa, synthetic construct
EAAAKGSSGGG

SEQ ID NO: 13200 - protein, 11 aa, synthetic construct
GSSGGSEAAAK

SEQ ID NO: 13201 - protein, 11 aa, synthetic construct
EAAAKGGSGSS

SEQ ID NO: 13202 - protein, 11 aa, synthetic construct
PAPAPAPAPAP

SEQ ID NO: 13203 - protein, 30 aa, synthetic construct; identical to SEQ ID NO: 5112

SEQ ID NO: 13204 - protein, 7 aa, synthetic construct
GGGGGGG

SEQ ID NO: 13205 - protein, 5 aa, synthetic construct
EAAAK

SEQ ID NO: 13206 - protein, 11 aa, synthetic construct
GGGEAAAKGGS

SEQ ID NO: 13207 - protein, 11 aa, synthetic construct
GGGEAAAKGGS

SEQ ID NO: 13208 - protein, 9 aa, synthetic construct
GGGGGSPAP

SEQ ID NO: 13209 - protein, 20 aa, synthetic construct
GGGGSGGGGSGGGGSGGGGS

SEQ ID NO: 13210 - protein, 7 aa, synthetic construct
GGGGGGG

SEQ ID NO: 13211 - protein, 13 aa, synthetic construct
PAPAPAPAPAPAP

SEQ ID NO: 13212 - protein, 9 aa, synthetic construct
GSSPAPGGG

SEQ ID NO: 13213 - protein, 9 aa, synthetic construct
GGGGGSPAP

SEQ ID NO: 13214 - protein, 15 aa, synthetic construct
GGGGSGGGGSGGGGS

SEQ ID NO: 13215 - protein, 15 aa, synthetic construct
GGGGSGGGGSGGGGS

SEQ ID NO: 13216 - protein, 11 aa, synthetic construct
GSSEAAAKGGS

SEQ ID NO: 13217 - protein, 15 aa, synthetic construct
GSSGSSGSSGSSGSS

SEQ ID NO: 13218 - protein, 11 aa, synthetic construct
EAAAKGGGGGS

SEQ ID NO: 13219 - protein, 9 aa, synthetic construct
GSSGGGGGS

SEQ ID NO: 13220 - protein, 11 aa, synthetic construct
GGGEAAAKPAP

SEQ ID NO: 13221 - protein, 9 aa, synthetic construct
GSSGGSPAP

SEQ ID NO: 13222 - protein, 9 aa, synthetic construct
GSSGGGPAP

SEQ ID NO: 13223 - protein, 9 aa, synthetic construct
GGGGGSGSS

SEQ ID NO: 13224 - protein, 46 aa, synthetic construct; identical to SEQ ID NO: 5217

SEQ ID NO: 13225 - protein, 8 aa, synthetic construct
PAPEAAAK

SEQ ID NO: 13226 - protein, 15 aa, synthetic construct
GGGGSGGGGSGGGGS

SEQ ID NO: 13227 - protein, 9 aa, synthetic construct
GGSGSSGGG

SEQ ID NO: 13228 - protein, 8 aa, synthetic construct
EAAAKGGS

SEQ ID NO: 13229 - protein, 11 aa, synthetic construct
EAAAKGSSPAP

SEQ ID NO: 13230 - protein, 11 aa, synthetic construct
EAAAKGGSGSS

SEQ ID NO: 13231 - protein, 6 aa, synthetic construct
GSSGSS

SEQ ID NO: 13232 - protein, 9 aa, synthetic construct
PAPAPAPAP

SEQ ID NO: 13233 - protein, 6 aa, synthetic construct
GGSGGG

SEQ ID NO: 13234-13235 - skipped (2 entries)

SEQ ID NO: 13236 - protein, 11 aa, synthetic construct
GGSGSSEAAAK

SEQ ID NO: 13237 - protein, 11 aa, synthetic construct
PAPEAAAKGSS

SEQ ID NO: 13238 - protein, 6 aa, synthetic construct
GGSGGS

SEQ ID NO: 13239 - protein, 7 aa, synthetic construct
GGGGGGG

SEQ ID NO: 13240 - protein, 11 aa, synthetic construct
GGSPAPEAAAK

SEQ ID NO: 13241 - protein, 30 aa, synthetic construct; identical to SEQ ID NO: 5130

SEQ ID NO: 13242 - protein, 6 aa, synthetic construct
GGSPAP

SEQ ID NO: 13243 - protein, 11 aa, synthetic construct
GGSEAAAKGGG

SEQ ID NO: 13244 - protein, 10 aa, synthetic construct
GGGGSGGGGS

SEQ ID NO: 13245 - protein, 8 aa, synthetic construct
GGGEAAAK

SEQ ID NO: 13246 - protein, 30 aa, synthetic construct; identical to SEQ ID NO: 5112

SEQ ID NO: 13247 - protein, 11 aa, synthetic construct
GGSEAAAKPAP

SEQ ID NO: 13248 - protein, 11 aa, synthetic construct
GSSGGGEAAAK

SEQ ID NO: 13249 - protein, 11 aa, synthetic construct
GGGGGSEAAAK

SEQ ID NO: 13250 - protein, 11 aa, synthetic construct
EAAAKGGSGGG

SEQ ID NO: 13251 - protein, 9 aa, synthetic construct
GGGGSSPAP

SEQ ID NO: 13252 - protein, 10 aa, synthetic construct
EAAAKEAAAK

SEQ ID NO: 13253 - protein, 46 aa, synthetic construct; identical to SEQ ID NO: 5217

SEQ ID NO: 13254 - protein, 15 aa, synthetic construct
GSSGSSGSSGSSGSS

SEQ ID NO: 13255 - protein, 6 aa, synthetic construct
GSSGGG

SEQ ID NO: 13256 - protein, 6 aa, synthetic construct
GSSGGS

SEQ ID NO: 13257 - protein, 10 aa, synthetic construct
GGGGSGGGGS

SEQ ID NO: 13258 - protein, 6 aa, synthetic construct
PAPGSS

SEQ ID NO: 13259 - protein, 11 aa, synthetic construct
GGGPAPEAAAK

SEQ ID NO: 13260 - protein, 8 aa, synthetic construct
EAAAKGGS

SEQ ID NO: 13261 - skipped

SEQ ID NO: 13262 - protein, 4 aa, synthetic construct
GGGG

SEQ ID NO: 13263 - protein, 11 aa, synthetic construct
GGGGGSEAAAK

SEQ ID NO: 13264 - protein, 15 aa, synthetic construct
GSSGSSGSSGSSGSS

SEQ ID NO: 13265 - protein, 9 aa, synthetic construct
PAPGGSGGG

SEQ ID NO: 13266 - protein, 6 aa, synthetic construct
GGGPAP

SEQ ID NO: 13267 - protein, 11 aa, synthetic construct
GGGPAPEAAAK

SEQ ID NO: 13268 - protein, 8 aa, synthetic construct
GGGEAAAK

SEQ ID NO: 13269 - skipped

SEQ ID NO: 13270 - protein, 11 aa, synthetic construct
EAAAKPAPGSS

SEQ ID NO: 13271 - protein, 11 aa, synthetic construct
GGSGSSEAAAK

SEQ ID NO: 13272 - protein, 8 aa, synthetic construct
EAAAKGSS

SEQ ID NO: 13273 - protein, 11 aa, synthetic construct
GGSGSSEAAAK

SEQ ID NO: 13274 - protein, 6 aa, synthetic construct
GGSGGG

SEQ ID NO: 13275 - protein, 6 aa, synthetic construct
GGGPAP

SEQ ID NO: 13276 - protein, 9 aa, synthetic construct
GGSPAPGGG

SEQ ID NO: 13277 - protein, 11 aa, synthetic construct
GGGGGSEAAAK

SEQ ID NO: 13278 - protein, 11 aa, synthetic construct
EAAAKGSSGGS

SEQ ID NO: 13279 - protein, 5 aa, synthetic construct
PAPAP

SEQ ID NO: 13280 - protein, 9 aa, synthetic construct
GSSPAPGGS

SEQ ID NO: 13281 - protein, 11 aa, synthetic construct
GSSEAAAKGGG

SEQ ID NO: 13282 - protein, 11 aa, synthetic construct
EAAAKGGGGGS

SEQ ID NO: 13283 - protein, 15 aa, synthetic construct
GSSGSSGSSGSSGSS

SEQ ID NO: 13284 - protein, 11 aa, synthetic construct
EAAAKGGGGSS

SEQ ID NO: 13285 - protein, 8 aa, synthetic construct
EAAAKGSS

SEQ ID NO: 13286 - protein, 30 aa, synthetic construct; identical to SEQ ID NO: 5130

SEQ ID NO: 13287 - protein, 8 aa, synthetic construct
EAAAKGGS

SEQ ID NO: 13288 - protein, 11 aa, synthetic construct
GSSGGSEAAAK

SEQ ID NO: 13289 - protein, 11 aa, synthetic construct
EAAAKPAPGGS

SEQ ID NO: 13290 - protein, 6 aa, synthetic construct
GGSGGS

SEQ ID NO: 13291 - protein, 11 aa, synthetic construct
EAAAKGSSGGG

SEQ ID NO: 13292 - protein, 12 aa, synthetic construct
GGSGGSGGSGGS

SEQ ID NO: 13293 - protein, 8 aa, synthetic construct
GGGGGGGG

SEQ ID NO: 13294 - protein, 11 aa, synthetic construct
GGSGSSEAAAK

SEQ ID NO: 13295 - protein, 8 aa, synthetic construct
EAAAKGGG

SEQ ID NO: 13296 - protein, 15 aa, synthetic construct
GGGGSGGGGSGGGGS

SEQ ID NO: 13297 - protein, 12 aa, synthetic construct
GGSGGSGGSGGS

SEQ ID NO: 13298 - protein, 11 aa, synthetic construct
PAPAPAPAPAP

SEQ ID NO: 13299 - protein, 20 aa, synthetic construct
EAAAKEAAAKEAAAKEAAAK

SEQ ID NO: 13300 - protein, 9 aa, synthetic construct
GGSGGSGGS

SEQ ID NO: 13301 - protein, 9 aa, synthetic construct
PAPGGGGSS

SEQ ID NO: 13302 - protein, 11 aa, synthetic construct
GSSEAAAKGGS

SEQ ID NO: 13303 - protein, 9 aa, synthetic construct
GSSGGGPAP

SEQ ID NO: 13304 - protein, 6 aa, synthetic construct
GGSGSS

SEQ ID NO: 13305 - protein, 11 aa, synthetic construct
GGGGGSEAAAK

SEQ ID NO: 13306 - protein, 8 aa, synthetic construct
GSSEAAAK

SEQ ID NO: 13307 - protein, 9 aa, synthetic construct
GGGGGSGSS

SEQ ID NO: 13308 - protein, 11 aa, synthetic construct
EAAAKGGSGSS

SEQ ID NO: 13309 - skipped

SEQ ID NO: 13310 - protein, 5 aa, synthetic construct
GGGGG

SEQ ID NO: 13311 - protein, 5 aa, synthetic construct
EAAAK

SEQ ID NO: 13312 - skipped

SEQ ID NO: 13313 - protein, 13 aa, synthetic construct
PAPAPAPAPAPAP

SEQ ID NO: 13314 - protein, 20 aa, synthetic construct
EAAAKEAAAKEAAAKEAAAK

SEQ ID NO: 13315 - protein, 15 aa, synthetic construct
EAAAKGGGGSEAAAK

SEQ ID NO: 13316 - protein, 9 aa, synthetic construct
PAPGGSGGG

SEQ ID NO: 13317 - protein, 9 aa, synthetic construct
GGSGGGPAP

SEQ ID NO: 13318 - protein, 11 aa, synthetic construct
GGGGSSEAAAK

SEQ ID NO: 13319 - protein, 9 aa, synthetic construct
PAPGGGGSS

SEQ ID NO: 13320 - protein, 12 aa, synthetic construct
GGSGGSGGSGGS

SEQ ID NO: 13321 - protein, 9 aa, synthetic construct
PAPGGSGGG

SEQ ID NO: 13322 - protein, 9 aa, synthetic construct
GSSPAPGGS

SEQ ID NO: 13323 - protein, 9 aa, synthetic construct
GSSGSSGSS

SEQ ID NO: 13324 - protein, 9 aa, synthetic construct
PAPGGGGGS

SEQ ID NO: 13325 - protein, 6 aa, synthetic construct
GSSPAP

SEQ ID NO: 13326 - protein, 6 aa, synthetic construct
GGSGGG

SEQ ID NO: 13327 - protein, 15 aa, synthetic construct
EAAAKGGGGSEAAAK

SEQ ID NO: 13328 - protein, 11 aa, synthetic construct
GGSPAPEAAAK

SEQ ID NO: 13329 - protein, 8 aa, synthetic construct
EAAAKPAP

SEQ ID NO: 13330 - protein, 30 aa, synthetic construct; identical to SEQ ID NO: 5112

SEQ ID NO: 13331 - protein, 11 aa, synthetic construct
EAAAKGGGGSS

SEQ ID NO: 13332 - protein, 10 aa, synthetic construct
EAAAKEAAAK

SEQ ID NO: 13333 - protein, 11 aa, synthetic construct
GSSEAAAKGGS

SEQ ID NO: 13334 - protein, 6 aa, synthetic construct
GGSPAP

SEQ ID NO: 13335 - protein, 20 aa, synthetic construct
EAAAKEAAAKEAAAKEAAAK

SEQ ID NO: 13336 - protein, 15 aa, synthetic construct
GSSGSSGSSGSSGSS

SEQ ID NO: 13337 - protein, 8 aa, synthetic construct
PAPEAAAK

SEQ ID NO: 13338 - protein, 9 aa, synthetic construct
GSSGGSPAP

SEQ ID NO: 13339 - protein, 9 aa, synthetic construct
GGGPAPGGS

SEQ ID NO: 13340 - protein, 11 aa, synthetic construct
EAAAKPAPGGS

SEQ ID NO: 13341 - protein, 10 aa, synthetic construct
GGGGSGGGGS

SEQ ID NO: 13342 - protein, 8 aa, synthetic construct
GGGEAAAK

SEQ ID NO: 13343 - protein, 11 aa, synthetic construct
EAAAKGGGGGS

SEQ ID NO: 13344 - protein, 9 aa, synthetic construct
GGSPAPGSS

SEQ ID NO: 13345 - protein, 11 aa, synthetic construct
GSSPAPEAAAK

SEQ ID NO: 13346 - protein, 12 aa, synthetic construct
GSAGSAAGSGEF

SEQ ID NO: 13347 - protein, 5 aa, synthetic construct
EAAAK

SEQ ID NO: 13348 - protein, 11 aa, synthetic construct
EAAAKGGGGSS

SEQ ID NO: 13349 - skipped

SEQ ID NO: 13350 - protein, 9 aa, synthetic construct
GGSGSSPAP

SEQ ID NO: 13351 - protein, 11 aa, synthetic construct
GGSEAAAKPAP

SEQ ID NO: 13352 - protein, 11 aa, synthetic construct
EAAAKGGSGSS

SEQ ID NO: 13353 - protein, 6 aa, synthetic construct
PAPGSS

SEQ ID NO: 13354 - protein, 11 aa, synthetic construct
PAPEAAAKGGG

SEQ ID NO: 13355 - protein, 46 aa, synthetic construct; identical to SEQ ID NO: 5217

SEQ ID NO: 13356 - protein, 9 aa, synthetic construct
GSSGSSGSS

SEQ ID NO: 13357 - protein, 6 aa, synthetic construct
PAPGGG

SEQ ID NO: 13358 - protein, 6 aa, synthetic construct
PAPGGS

SEQ ID NO: 13359 - protein, 6 aa, synthetic construct
GSSGGG

SEQ ID NO: 13360 - protein, 18 aa, synthetic construct
GSSGSSGSSGSSGSSGSS

SEQ ID NO: 13361 - skipped

SEQ ID NO: 13362 - protein, 11 aa, synthetic construct
EAAAKGSSPAP

SEQ ID NO: 13363 - protein, 12 aa, synthetic construct
GSSGSSGSSGSS

SEQ ID NO: 13364 - protein, 25 aa, synthetic construct
GGGGSGGGGSGGGGSGGGGSGGGGS

SEQ ID NO: 13365 - protein, 5 aa, synthetic construct
GGGGS

SEQ ID NO: 13366 - protein, 11 aa, synthetic construct
EAAAKGSSGGG

SEQ ID NO: 13367 - protein, 6 aa, synthetic construct
GGGGGG

SEQ ID NO: 13368 - protein, 11 aa, synthetic construct
GGSGSSEAAAK

SEQ ID NO: 13369 - protein, 11 aa, synthetic construct
GSSPAPEAAAK

SEQ ID NO: 13370 - protein, 10 aa, synthetic construct
GGGGSGGGGS

SEQ ID NO: 13371 - protein, 9 aa, synthetic construct
GSSGGGGGS

SEQ ID NO: 13372 - protein, 12 aa, synthetic construct
GSAGSAAGSGEF

SEQ ID NO: 13373 - protein, 11 aa, synthetic construct
GGGEAAAKGSS

SEQ ID NO: 13374 - protein, 46 aa, synthetic construct; identical to SEQ ID NO: 5217

SEQ ID NO: 13375 - protein, 9 aa, synthetic construct
PAPGGSGGG

SEQ ID NO: 13376 - protein, 25 aa, synthetic construct
EAAAKEAAAKEAAAKEAAAKEAAAK

SEQ ID NO: 13377 - protein, 9 aa, synthetic construct
GGSGSSPAP

SEQ ID NO: 13378 - protein, 6 aa, synthetic construct
GGGGGG

SEQ ID NO: 13379 - protein, 25 aa, synthetic construct
EAAAKEAAAKEAAAKEAAAKEAAAK

SEQ ID NO: 13380 - protein, 11 aa, synthetic construct
EAAAKGSSPAP

SEQ ID NO: 13381 - protein, 9 aa, synthetic construct
GGGPAPGGS

SEQ ID NO: 13382 - protein, 46 aa, synthetic construct; identical to SEQ ID NO: 5217

SEQ ID NO: 13383 - skipped

SEQ ID NO: 13384 - protein, 8 aa, synthetic construct
EAAAKGGS

SEQ ID NO: 13385 - protein, 11 aa, synthetic construct
GSSGGSEAAAK

SEQ ID NO: 13386 - protein, 11 aa, synthetic construct
GGSGSSEAAAK

SEQ ID NO: 13387 - protein, 15 aa, synthetic construct
EAAAKEAAAKEAAAK

SEQ ID NO: 13388 - protein, 11 aa, synthetic construct
GGSGGGEAAAK

SEQ ID NO: 13389 - protein, 20 aa, synthetic construct
GGGGSGGGGSGGGGSGGGGS

SEQ ID NO: 13390 - protein, 8 aa, synthetic construct
EAAAKGSS

SEQ ID NO: 13391 - protein, 9 aa, synthetic construct
GSSGGGGGS

SEQ ID NO: 13392 - protein, 18 aa, synthetic construct
GSSGSSGSSGSSGSSGSS

SEQ ID NO: 13393 - protein, 6 aa, synthetic construct
GGSGSS

SEQ ID NO: 13394 - protein, 15 aa, synthetic construct
EAAAKGGGGSEAAAK

SEQ ID NO: 13395 - protein, 11 aa, synthetic construct
EAAAKGGGPAP

SEQ ID NO: 13396 - protein, 11 aa, synthetic construct
GGSEAAAKGGG

SEQ ID NO: 13397 - protein, 30 aa, synthetic construct; identical to SEQ ID NO: 5130

SEQ ID NO: 13398 - protein, 30 aa, synthetic construct; identical to SEQ ID NO: 5130

SEQ ID NO: 13399 - protein, 11 aa, synthetic construct
GSSPAPEAAAK

SEQ ID NO: 13400 - protein, 15 aa, synthetic construct
GGGGSEAAAKGGGGS

SEQ ID NO: 13401 - protein, 12 aa, synthetic construct
GSSGSSGSSGSS

SEQ ID NO: 13402 - protein, 8 aa, synthetic construct
GGSEAAAK

SEQ ID NO: 13403 - protein, 8 aa, synthetic construct
GGGGGGGG

SEQ ID NO: 13404 - protein, 6 aa, synthetic construct
GSSGGG

SEQ ID NO: 13405 - protein, 8 aa, synthetic construct
EAAAKGGS

SEQ ID NO: 13406 - protein, 5 aa, synthetic construct
GGGGS

SEQ ID NO: 13407 - protein, 11 aa, synthetic construct
GGSEAAAKGGG

SEQ ID NO: 13408 - protein, 9 aa, synthetic construct
GGSGSSGGG

SEQ ID NO: 13409 - protein, 11 aa, synthetic construct
GGSGSSEAAAK

SEQ ID NO: 13410 - protein, 11 aa, synthetic construct
EAAAKGGSGSS

SEQ ID NO: 13411 - skipped

SEQ ID NO: 13412 - protein, 9 aa, synthetic construct
GGGPAPGSS

SEQ ID NO: 13413 - protein, 15 aa, synthetic construct
GSSGSSGSSGSSGSS

SEQ ID NO: 13414 - protein, 11 aa, synthetic construct
GGGEAAAKPAP

SEQ ID NO: 13415 - protein, 6 aa, synthetic construct
GSSGGG

SEQ ID NO: 13416 - protein, 9 aa, synthetic construct
GGSPAPGSS

SEQ ID NO: 13417 - protein, 6 aa, synthetic construct
PAPGGS

SEQ ID NO: 13418 - protein, 11 aa, synthetic construct
PAPAPAPAPAP

SEQ ID NO: 13419 - protein, 6 aa, synthetic construct
GSSGGS

SEQ ID NO: 13420 - protein, 11 aa, synthetic construct
GSSGGSEAAAK

SEQ ID NO: 13421 - protein, 11 aa, synthetic construct
EAAAKGSSGGS

SEQ ID NO: 13422 - protein, 8 aa, synthetic construct
EAAAKGGG

SEQ ID NO: 13423 - protein, 9 aa, synthetic construct
PAPGGGGGS

SEQ ID NO: 13424 - protein, 15 aa, synthetic construct
GGGGSEAAAKGGGGS

SEQ ID NO: 13425 - protein, 30 aa, synthetic construct; identical to SEQ ID NO: 5130

SEQ ID NO: 13426 - skipped

SEQ ID NO: 13427 - protein, 9 aa, synthetic construct
GSSGGSPAP

SEQ ID NO: 13428 - skipped

SEQ ID NO: 13429 - protein, 6 aa, synthetic construct
PAPGSS

SEQ ID NO: 13430 - protein, 11 aa, synthetic construct
GGSEAAAKGGG

SEQ ID NO: 13431 - protein, 11 aa, synthetic construct
GGSEAAAKPAP

SEQ ID NO: 13432 - protein, 9 aa, synthetic construct
GGGGSSPAP

SEQ ID NO: 13433 - protein, 25 aa, synthetic construct
EAAAKEAAAKEAAAKEAAAKEAAAK

SEQ ID NO: 13434 - protein, 4 aa, synthetic construct
GGGG

SEQ ID NO: 13435 - protein, 11 aa, synthetic construct
GGSEAAAKPAP

SEQ ID NO: 13436 - protein, 9 aa, synthetic construct
PAPGSSGGG

SEQ ID NO: 13437 - protein, 11 aa, synthetic construct
PAPEAAAKGGS

SEQ ID NO: 13438 - protein, 9 aa, synthetic construct
GGGGSSPAP

SEQ ID NO: 13439 - protein, 20 aa, synthetic construct
GGGGSGGGGSGGGGSGGGGS

SEQ ID NO: 13440 - protein, 8 aa, synthetic construct
GGGEAAAK

SEQ ID NO: 13441 - protein, 6 aa, synthetic construct
GGGGSS

SEQ ID NO: 13442 - protein, 9 aa, synthetic construct
GGSPAPGSS

SEQ ID NO: 13443 - protein, 5 aa, synthetic construct
GGGGS

SEQ ID NO: 13444 - protein, 11 aa, synthetic construct
EAAAKGSSGGS

SEQ ID NO: 13445 - skipped

SEQ ID NO: 13446 - protein, 4 aa, synthetic construct
GGGG

SEQ ID NO: 13447 - protein, 6 aa, synthetic construct
GSSGGS

SEQ ID NO: 13448 - protein, 12 aa, synthetic construct
GGSGGSGGSGGS

SEQ ID NO: 13449 - protein, 11 aa, synthetic construct
PAPEAAAKGGS

SEQ ID NO: 13450 - protein, 11 aa, synthetic construct
EAAAKGSSGGG

SEQ ID NO: 13451 - protein, 8 aa, synthetic construct
GSSEAAAK

SEQ ID NO: 13452 - protein, 12 aa, synthetic construct
GSAGSAAGSGEF

SEQ ID NO: 13453 - protein, 11 aa, synthetic construct
GGGGGSEAAAK

SEQ ID NO: 13454 - protein, 4 aa, synthetic construct
GGGG

SEQ ID NO: 13455 - protein, 11 aa, synthetic construct
GGGGSSEAAAK

SEQ ID NO: 13456 - protein, 6 aa, synthetic construct
PAPGGG

SEQ ID NO: 13457 - protein, 11 aa, synthetic construct
EAAAKGGSGGG

SEQ ID NO: 13458 - protein, 9 aa, synthetic construct
GGGPAPGGS

SEQ ID NO: 13459 - protein, 8 aa, synthetic construct
EAAAKPAP

SEQ ID NO: 13460 - protein, 9 aa, synthetic construct
GSSGSSGSS

SEQ ID NO: 13461 - protein, 9 aa, synthetic construct
GSSPAPGGS

SEQ ID NO: 13462 - protein, 9 aa, synthetic construct
GGGGGSPAP

SEQ ID NO: 13463 - protein, 9 aa, synthetic construct
GGSGSSGGG

SEQ ID NO: 13464 - protein, 11 aa, synthetic construct
GGGEAAAKGSS

SEQ ID NO: 13465 - protein, 8 aa, synthetic construct
GSSEAAAK

SEQ ID NO: 13466 - protein, 5 aa, synthetic construct
EAAAK

SEQ ID NO: 13467 - protein, 11 aa, synthetic construct
EAAAKGGSGSS

SEQ ID NO: 13468 - protein, 11 aa, synthetic construct
GSSEAAAKGGG

SEQ ID NO: 13469 - protein, 9 aa, synthetic construct
PAPGSSGGG

SEQ ID NO: 13470 - protein, 11 aa, synthetic construct
EAAAKGGGGGS

SEQ ID NO: 13471 - protein, 11 aa, synthetic construct
GGSEAAAKPAP

SEQ ID NO: 13472 - protein, 9 aa, synthetic construct
GGGPAPGGS

SEQ ID NO: 13473 - protein, 5 aa, synthetic construct
GGGGS

SEQ ID NO: 13474 - protein, 15 aa, synthetic construct
GGSGGSGGSGGSGGS

SEQ ID NO: 13475 - protein, 6 aa, synthetic construct
GGGPAP

SEQ ID NO: 13476 - protein, 8 aa, synthetic construct
EAAAKPAP

SEQ ID NO: 13477 - protein, 8 aa, synthetic construct
GGSEAAAK

SEQ ID NO: 13478 - protein, 11 aa, synthetic construct
GSSEAAAKPAP

SEQ ID NO: 13479 - protein, 6 aa, synthetic construct
GGSGSS

SEQ ID NO: 13480 - protein, 11 aa, synthetic construct
EAAAKPAPGGG

SEQ ID NO: 13481 - protein, 11 aa, synthetic construct
GGSPAPEAAAK

SEQ ID NO: 13482 - protein, 11 aa, synthetic construct
GGSEAAAKGGG

SEQ ID NO: 13483 - protein, 15 aa, synthetic construct
GGGGSEAAAKGGGGS

SEQ ID NO: 13484 - protein, 11 aa, synthetic construct
GSSGGGEAAAK

SEQ ID NO: 13485 - protein, 11 aa, synthetic construct
EAAAKGGGPAP

SEQ ID NO: 13486 - protein, 6 aa, synthetic construct
GSSPAP

SEQ ID NO: 13487 - protein, 46 aa, synthetic construct; identical to SEQ ID NO: 5217

SEQ ID NO: 13488 - protein, 11 aa, synthetic construct
GGSEAAAKGSS

SEQ ID NO: 13489 - protein, 11 aa, synthetic construct
GSSGGSEAAAK

SEQ ID NO: 13490 - protein, 11 aa, synthetic construct
GGSEAAAKGSS

SEQ ID NO: 13491 - protein, 8 aa, synthetic construct
EAAAKGGG

SEQ ID NO: 13492 - protein, 11 aa, synthetic construct
GSSGGSEAAAK

SEQ ID NO: 13493 - protein, 15 aa, synthetic construct
GGGGSEAAAKGGGGS

SEQ ID NO: 13494 - protein, 11 aa, synthetic construct
PAPGSSEAAAK

SEQ ID NO: 13495 - protein, 8 aa, synthetic construct
PAPEAAAK

SEQ ID NO: 13496 - protein, 9 aa, synthetic construct
PAPGGSGSS

SEQ ID NO: 13497 - protein, 6 aa, synthetic construct
PAPGSS

SEQ ID NO: 13498 - protein, 9 aa, synthetic construct
PAPGGGGGS

SEQ ID NO: 13499 - protein, 11 aa, synthetic construct
EAAAKPAPGSS

SEQ ID NO: 13500 - protein, 9 aa, synthetic construct
GSSPAPGGS

SEQ ID NO: 13501 - protein, 11 aa, synthetic construct
GGSGSSEAAAK

SEQ ID NO: 13502 - protein, 6 aa, synthetic construct
GGGGGG

SEQ ID NO: 13503 - protein, 20 aa, synthetic construct
EAAAKEAAAKEAAAKEAAAK

SEQ ID NO: 13504 - protein, 9 aa, synthetic construct
GGSPAPGSS

SEQ ID NO: 13505 - protein, 11 aa, synthetic construct
PAPAPAPAPAP

SEQ ID NO: 13506 - protein, 9 aa, synthetic construct
GGSGSSPAP

SEQ ID NO: 13507 - protein, 11 aa, synthetic construct
EAAAKGGSGGG

SEQ ID NO: 13508 - protein, 15 aa, synthetic construct
GSSGSSGSSGSSGSS

SEQ ID NO: 13509 - protein, 46 aa, synthetic construct; identical to SEQ ID NO: 5217

SEQ ID NO: 13510 - protein, 11 aa, synthetic construct
GSSGGGEAAAK

SEQ ID NO: 13511 - protein, 11 aa, synthetic construct
GSSGGSEAAAK

SEQ ID NO: 13512 - protein, 8 aa, synthetic construct
GGGGGGGG

SEQ ID NO: 13513 - protein, 11 aa, synthetic construct
PAPGGSEAAAK

SEQ ID NO: 13514 - protein, 9 aa, synthetic construct
GGGGSSPAP

SEQ ID NO: 13515 - protein, 9 aa, synthetic construct
PAPAPAPAP

SEQ ID NO: 13516 - protein, 11 aa, synthetic construct
GGSEAAAKPAP

SEQ ID NO: 13517 - protein, 9 aa, synthetic construct
PAPGGSGGG

SEQ ID NO: 13518 - protein, 30 aa, synthetic construct; identical to SEQ ID NO: 5130

SEQ ID NO: 13519 - protein, 15 aa, synthetic construct
GGGGSGGGGSGGGGS

SEQ ID NO: 13520 - protein, 9 aa, synthetic construct
GGSGGGPAP

SEQ ID NO: 13521 - protein, 11 aa, synthetic construct
GGGPAPEAAAK

SEQ ID NO: 13522 - protein, 9 aa, synthetic construct
GGGGGSGSS

SEQ ID NO: 13523 - skipped

SEQ ID NO: 13524 - protein, 9 aa, synthetic construct
GGGGGSPAP

SEQ ID NO: 13525 - protein, 6 aa, synthetic construct
GGSPAP

SEQ ID NO: 13526 - protein, 9 aa, synthetic construct
GGGPAPGGS

SEQ ID NO: 13527 - protein, 9 aa, synthetic construct
PAPGSSGGG

SEQ ID NO: 13528 - protein, 9 aa, synthetic construct
PAPGSSGGG

SEQ ID NO: 13529 - protein, 6 aa, synthetic construct
PAPGGS

SEQ ID NO: 13530 - protein, 11 aa, synthetic construct
GGGEAAAKGSS

SEQ ID NO: 13531 - protein, 11 aa, synthetic construct
GGSEAAAKGSS

SEQ ID NO: 13532 - protein, 11 aa, synthetic construct
PAPGGSEAAAK

SEQ ID NO: 13533 - protein, 11 aa, synthetic construct
GGSEAAAKGGG

SEQ ID NO: 13534 - protein, 9 aa, synthetic construct
GGSGGGGSS

SEQ ID NO: 13535 - protein, 11 aa, synthetic construct
GGGEAAAKPAP

SEQ ID NO: 13536 - protein, 8 aa, synthetic construct
EAAAKGSS

SEQ ID NO: 13537 - protein, 11 aa, synthetic construct
PAPEAAAKGSS

SEQ ID NO: 13538 - protein, 12 aa, synthetic construct
GSAGSAAGSGEF

SEQ ID NO: 13539 - protein, 11 aa, synthetic construct
EAAAKGGGGGS

SEQ ID NO: 13540 - protein, 11 aa, synthetic construct
EAAAKGSSPAP

SEQ ID NO: 13541 - protein, 15 aa, synthetic construct
GGGGSEAAAKGGGGS

SEQ ID NO: 13542 - protein, 11 aa, synthetic construct
GSSEAAAKPAP

SEQ ID NO: 13543 - protein, 6 aa, synthetic construct
GGGGGG

SEQ ID NO: 13544 - protein, 6 aa, synthetic construct
PAPGGS

SEQ ID NO: 13545 - skipped

SEQ ID NO: 13546 - protein, 7 aa, synthetic construct
PAPAPAP

SEQ ID NO: 13547 - protein, 4 aa, synthetic construct
GGGG

SEQ ID NO: 13548 - protein, 11 aa, synthetic construct
GSSGGSEAAAK

SEQ ID NO: 13549 - protein, 9 aa, synthetic construct
GGSGGGGSS

SEQ ID NO: 13550 - protein, 9 aa, synthetic construct
GGGGSSGGS

SEQ ID NO: 13551 - protein, 9 aa, synthetic construct
GSSPAPGGG

SEQ ID NO: 13552 - protein, 11 aa, synthetic construct
GGSEAAAKPAP

SEQ ID NO: 13553 - skipped

SEQ ID NO: 13554 - protein, 6 aa, synthetic construct
GSSGGS

SEQ ID NO: 13555 - protein, 5 aa, synthetic construct
GGGGG

SEQ ID NO: 13556 - protein, 9 aa, synthetic construct
GSSGGGPAP

SEQ ID NO: 13557 - protein, 11 aa, synthetic construct
GSSEAAAKGGG

SEQ ID NO: 13558 - protein, 30 aa, synthetic construct; identical to SEQ ID NO: 5130

SEQ ID NO: 13559 - protein, 11 aa, synthetic construct
GGSEAAAKPAP

SEQ ID NO: 13560 - protein, 13 aa, synthetic construct
PAPAPAPAPAPAP

SEQ ID NO: 13561 - protein, 15 aa, synthetic construct
GGGGSEAAAKGGGGS

SEQ ID NO: 13562 - protein, 11 aa, synthetic construct
EAAAKPAPGSS

SEQ ID NO: 13563 - protein, 15 aa, synthetic construct
GSSGSSGSSGSSGSS

SEQ ID NO: 13564 - protein, 11 aa, synthetic construct
PAPEAAAKGSS

SEQ ID NO: 13565 - protein, 46 aa, synthetic construct; identical to SEQ ID NO: 5217

SEQ ID NO: 13566 - protein, 46 aa, synthetic construct; identical to SEQ ID NO: 5217

SEQ ID NO: 13567 - protein, 11 aa, synthetic construct
GGSEAAAKGGG

SEQ ID NO: 13568 - protein, 9 aa, synthetic construct
GGSGGGGSS

SEQ ID NO: 13569 - protein, 11 aa, synthetic construct
PAPEAAAKGSS

SEQ ID NO: 13570 - skipped

SEQ ID NO: 13571 - protein, 11 aa, synthetic construct
GGSGGGEAAAK

SEQ ID NO: 13572 - protein, 11 aa, synthetic construct
EAAAKGGGGSS

SEQ ID NO: 13573 - protein, 9 aa, synthetic construct
GSSPAPGGG

SEQ ID NO: 13574 - protein, 11 aa, synthetic construct
EAAAKGSSGGG

SEQ ID NO: 13575 - protein, 11 aa, synthetic construct
GGSGGGEAAAK

SEQ ID NO: 13576 - protein, 15 aa, synthetic construct
GGSGGSGGSGGSGGS

SEQ ID NO: 13577 - protein, 11 aa, synthetic construct
EAAAKPAPGGS

SEQ ID NO: 13578 - protein, 11 aa, synthetic construct
GGGGGSEAAAK

SEQ ID NO: 13579 - protein, 6 aa, synthetic construct
GSSPAP

SEQ ID NO: 13580 - protein, 11 aa, synthetic construct
GGGEAAAKPAP

SEQ ID NO: 13581 - protein, 11 aa, synthetic construct
GSSGGSEAAAK

SEQ ID NO: 13582 - protein, 11 aa, synthetic construct
EAAAKPAPGGS

SEQ ID NO: 13583 - protein, 6 aa, synthetic construct
PAPGGG

SEQ ID NO: 13584 - protein, 11 aa, synthetic construct
EAAAKGSSPAP

SEQ ID NO: 13585 - protein, 11 aa, synthetic construct
GSSPAPEAAAK

SEQ ID NO: 13586 - protein, 11 aa, synthetic construct
GGSGGGEAAAK

SEQ ID NO: 13587 - protein, 9 aa, synthetic construct
GSSGSSGSS

SEQ ID NO: 13588 - protein, 8 aa, synthetic construct
EAAAKGGS

SEQ ID NO: 13589 - protein, 11 aa, synthetic construct
EAAAKPAPGGS

SEQ ID NO: 13590 - protein, 11 aa, synthetic construct
EAAAKPAPGGS

SEQ ID NO: 13591 - protein, 9 aa, synthetic construct
GSSGGGGGS

SEQ ID NO: 13592 - protein, 9 aa, synthetic construct
PAPGGGGSS

SEQ ID NO: 13593 - protein, 9 aa, synthetic construct
GSSGSSGSS

SEQ ID NO: 13594 - protein, 20 aa, synthetic construct
EAAAKEAAAKEAAAKEAAAK

SEQ ID NO: 13595 - skipped

SEQ ID NO: 13596 - protein, 11 aa, synthetic construct
EAAAKPAPGSS

SEQ ID NO: 13597 - protein, 8 aa, synthetic construct
EAAAKGGG

SEQ ID NO: 13598 - protein, 11 aa, synthetic construct
PAPGSSEAAAK

SEQ ID NO: 13599 - protein, 9 aa, synthetic construct
PAPGSSGGS

SEQ ID NO: 13600 - protein, 11 aa, synthetic construct
GSSPAPEAAAK

SEQ ID NO: 13601 - protein, 18 aa, synthetic construct
GSSGSSGSSGSSGSSGSS

SEQ ID NO: 13602 - protein, 5 aa, synthetic construct
GGGGS

SEQ ID NO: 13603 - protein, 6 aa, synthetic construct
GSSPAP

SEQ ID NO: 13604 - protein, 15 aa, synthetic construct
EAAAKGGGGSEAAAK

SEQ ID NO: 13605 - protein, 10 aa, synthetic construct
EAAAKEAAAK

SEQ ID NO: 13606 - protein, 9 aa, synthetic construct
GGGGSSGGS

SEQ ID NO: 13607 - protein, 11 aa, synthetic construct
PAPGGSEAAAK

SEQ ID NO: 13608 - protein, 11 aa, synthetic construct
EAAAKGGSPAP

SEQ ID NO: 13609 - protein, 9 aa, synthetic construct
GSSGGSGGG

SEQ ID NO: 13610 - protein, 6 aa, synthetic construct
GSSGGS

SEQ ID NO: 13611 - protein, 9 aa, synthetic construct
PAPGGSGSS

SEQ ID NO: 13612 - protein, 11 aa, synthetic construct
EAAAKGGSGSS

SEQ ID NO: 13613 - protein, 5 aa, synthetic construct
PAPAP

SEQ ID NO: 13614 - protein, 11 aa, synthetic construct
EAAAKGSSPAP

SEQ ID NO: 13615 - protein, 11 aa, synthetic construct
EAAAKPAPGGG

SEQ ID NO: 13616 - protein, 30 aa, synthetic construct; identical to SEQ ID NO: 5112

SEQ ID NO: 13617 - protein, 11 aa, synthetic construct
EAAAKGGGGSS

SEQ ID NO: 13618 - protein, 8 aa, synthetic construct
PAPEAAAK

SEQ ID NO: 13619 - protein, 11 aa, synthetic construct
EAAAKPAPGSS

SEQ ID NO: 13620 - protein, 6 aa, synthetic construct
GGSPAP

SEQ ID NO: 13621 - protein, 6 aa, synthetic construct
GGSGGS

SEQ ID NO: 13622 - protein, 11 aa, synthetic construct
PAPEAAAKGSS

SEQ ID NO: 13623 - protein, 6 aa, synthetic construct
PAPGSS

SEQ ID NO: 13624 - protein, 11 aa, synthetic construct
PAPAPAPAPAP

SEQ ID NO: 13625 - skipped

SEQ ID NO: 13626 - protein, 6 aa, synthetic construct
GGGPAP

SEQ ID NO: 13627 - protein, 11 aa, synthetic construct
GSSPAPEAAAK

SEQ ID NO: 13628 - skipped

SEQ ID NO: 13629 - protein, 6 aa, synthetic construct
GGSPAP

SEQ ID NO: 13630 - protein, 11 aa, synthetic construct
PAPEAAAKGGS

SEQ ID NO: 13631 - protein, 9 aa, synthetic construct
PAPGSSGGS

SEQ ID NO: 13632 - protein, 13 aa, synthetic construct
PAPAPAPAPAPAP

SEQ ID NO: 13633 - protein, 15 aa, synthetic construct
EAAAKEAAAKEAAAK

SEQ ID NO: 13634 - protein, 15 aa, synthetic construct
GGSGGSGGSGGSGGS

SEQ ID NO: 13635 - protein, 11 aa, synthetic construct
EAAAKPAPGGS

SEQ ID NO: 13636 - protein, 6 aa, synthetic construct
GGSGGS

SEQ ID NO: 13637 - protein, 8 aa, synthetic construct
EAAAKPAP

SEQ ID NO: 13638 - protein, 8 aa, synthetic construct
GGSEAAAK

SEQ ID NO: 13639 - protein, 6 aa, synthetic construct
GGSGGG

SEQ ID NO: 13640 - protein, 11 aa, synthetic construct
GGSGGGEAAAK

SEQ ID NO: 13641 - protein, 11 aa, synthetic construct
PAPEAAAKGGG

SEQ ID NO: 13642 - protein, 5 aa, synthetic construct
PAPAP

SEQ ID NO: 13643 - skipped

SEQ ID NO: 13644 - protein, 11 aa, synthetic construct
EAAAKGSSGGG

SEQ ID NO: 13645 - protein, 9 aa, synthetic construct
GGSPAPGSS

SEQ ID NO: 13646 - protein, 8 aa, synthetic construct
PAPEAAAK

SEQ ID NO: 13647 - protein, 11 aa, synthetic construct
EAAAKGGSPAP

SEQ ID NO: 13648 - protein, 9 aa, synthetic construct
PAPAPAPAP

SEQ ID NO: 13649 - protein, 11 aa, synthetic construct
PAPGGSEAAAK

SEQ ID NO: 13650 - protein, 12 aa, synthetic construct
GGSGGSGGSGGS

SEQ ID NO: 13651 - protein, 9 aa, synthetic construct
GGGGGSGSS

SEQ ID NO: 13652 - protein, 9 aa, synthetic construct
PAPGGSGGG

SEQ ID NO: 13653 - skipped

SEQ ID NO: 13654 - protein, 5 aa, synthetic construct
EAAAK

SEQ ID NO: 13655 - protein, 11 aa, synthetic construct
GGGEAAAKGSS

SEQ ID NO: 13656 - protein, 9 aa, synthetic construct
GGSPAPGSS

SEQ ID NO: 13657 - protein, 11 aa, synthetic construct
GGSEAAAKPAP

SEQ ID NO: 13658 - protein, 25 aa, synthetic construct
GGGGSGGGGSGGGGSGGGGSGGGGS

SEQ ID NO: 13659 - protein, 6 aa, synthetic construct
GGSGSS

SEQ ID NO: 13660 - protein, 11 aa, synthetic construct
GGGEAAAKGSS

SEQ ID NO: 13661 - protein, 11 aa, synthetic construct
EAAAKGGSPAP

SEQ ID NO: 13662 - protein, 11 aa, synthetic construct
GSSPAPEAAAK

SEQ ID NO: 13663 - protein, 12 aa, synthetic construct
GGSGGSGGSGGS

SEQ ID NO: 13664 - protein, 11 aa, synthetic construct
GSSPAPEAAAK

SEQ ID NO: 13665 - protein, 12 aa, synthetic construct
GSSGSSGSSGSS

SEQ ID NO: 13666 - protein, 11 aa, synthetic construct
GGSGSSEAAAK

SEQ ID NO: 13667 - protein, 6 aa, synthetic construct
GGSGGG

SEQ ID NO: 13668 - protein, 9 aa, synthetic construct
GGSPAPGGG

SEQ ID NO: 13669 - protein, 9 aa, synthetic construct
GGSGGSGGS

SEQ ID NO: 13670 - protein, 11 aa, synthetic construct
GGGGSSEAAAK

SEQ ID NO: 13671 - protein, 9 aa, synthetic construct
GGSPAPGSS

SEQ ID NO: 13672 - protein, 11 aa, synthetic construct
EAAAKPAPGSS

SEQ ID NO: 13673 - protein, 9 aa, synthetic construct
GGGGSSGGS

SEQ ID NO: 13674 - protein, 11 aa, synthetic construct
GGSPAPEAAAK

SEQ ID NO: 13675 - protein, 8 aa, synthetic construct
GGSEAAAK

SEQ ID NO: 13676 - protein, 12 aa, synthetic construct
GSSGSSGSSGSS

SEQ ID NO: 13677 - protein, 25 aa, synthetic construct
EAAAKEAAAKEAAAKEAAAKEAAAK

SEQ ID NO: 13678 - protein, 5 aa, synthetic construct
GGGGG

SEQ ID NO: 13679 - protein, 11 aa, synthetic construct
GGSEAAAKGSS

SEQ ID NO: 13680 - protein, 6 aa, synthetic construct
GSSGGG

SEQ ID NO: 13681 - protein, 9 aa, synthetic construct
PAPGSSGGG

SEQ ID NO: 13682 - protein, 6 aa, synthetic construct
GGSGGS

SEQ ID NO: 13683 - protein, 11 aa, synthetic construct
EAAAKGGGGGS

SEQ ID NO: 13684 - protein, 9 aa, synthetic construct
GGSGSSPAP

SEQ ID NO: 13685 - protein, 9 aa, synthetic construct
PAPGSSGGG

SEQ ID NO: 13686 - protein, 9 aa, synthetic construct
PAPGGSGGG

SEQ ID NO: 13687 - protein, 4 aa, synthetic construct
GGGG

SEQ ID NO: 13688 - protein, 11 aa, synthetic construct
EAAAKGGSPAP

SEQ ID NO: 13689 - protein, 6 aa, synthetic construct
GSSGSS

SEQ ID NO: 13690 - protein, 11 aa, synthetic construct
GGSEAAAKPAP

SEQ ID NO: 13691 - protein, 11 aa, synthetic construct
EAAAKGSSGGS

SEQ ID NO: 13692 - protein, 46 aa, synthetic construct; identical to SEQ ID NO: 5217

SEQ ID NO: 13693 - protein, 11 aa, synthetic construct
EAAAKGGSGSS

SEQ ID NO: 13694 - protein, 5 aa, synthetic construct
GGGGG

SEQ ID NO: 13695 - protein, 8 aa, synthetic construct
GGGEAAAK

SEQ ID NO: 13696 - protein, 12 aa, synthetic construct
GGSGGSGGSGGS

SEQ ID NO: 13697 - protein, 30 aa, synthetic construct; identical to SEQ ID NO: 5130

SEQ ID NO: 13698 - protein, 11 aa, synthetic construct
PAPAPAPAPAP

SEQ ID NO: 13699 - protein, 10 aa, synthetic construct
EAAAKEAAAK

SEQ ID NO: 13700 - protein, 11 aa, synthetic construct
GSSGGSEAAAK

SEQ ID NO: 13701 - protein, 11 aa, synthetic construct
PAPGGSEAAAK

SEQ ID NO: 13702 - protein, 11 aa, synthetic construct
EAAAKGGGPAP

SEQ ID NO: 13703 - protein, 9 aa, synthetic construct
PAPGGSGSS

SEQ ID NO: 13704 - protein, 16 aa, synthetic construct
SGSETPGTSESATPES

SEQ ID NO: 13705 - protein, 6 aa, synthetic construct
GGSGGS

SEQ ID NO: 13706 - protein, 8 aa, synthetic construct
EAAAKGGS

SEQ ID NO: 13707 - protein, 9 aa, synthetic construct
GGSPAPGSS

SEQ ID NO: 13708 - protein, 20 aa, synthetic construct
EAAAKEAAAKEAAAKEAAAK

SEQ ID NO: 13709 - protein, 9 aa, synthetic construct
GSSGGSGGG

SEQ ID NO: 13710 - protein, 11 aa, synthetic construct
PAPGSSEAAAK

SEQ ID NO: 13711 - protein, 13 aa, synthetic construct
PAPAPAPAPAPAP

SEQ ID NO: 13712 - protein, 6 aa, synthetic construct
GGGGSS

SEQ ID NO: 13713 - protein, 15 aa, synthetic construct
GGGGSEAAAKGGGGS

SEQ ID NO: 13714 - protein, 11 aa, synthetic construct
GSSPAPEAAAK

SEQ ID NO: 13715 - protein, 11 aa, synthetic construct
PAPEAAAKGGG

SEQ ID NO: 13716 - protein, 10 aa, synthetic construct
EAAAKEAAAK

SEQ ID NO: 13717 - protein, 5 aa, synthetic construct
EAAAK

SEQ ID NO: 13718 - protein, 9 aa, synthetic construct
GSSGGSGGG

SEQ ID NO: 13719 - protein, 11 aa, synthetic construct
GGGEAAAKPAP

SEQ ID NO: 13720 - protein, 6 aa, synthetic construct
GGSGGS

SEQ ID NO: 13721 - protein, 30 aa, synthetic construct; identical to SEQ ID NO: 5130

SEQ ID NO: 13722 - protein, 5 aa, synthetic construct
GGGGG

SEQ ID NO: 13723 - protein, 11 aa, synthetic construct
GSSGGSEAAAK

SEQ ID NO: 13724 - protein, 33 aa, synthetic construct; identical to SEQ ID NO: 5006

SEQ ID NO: 13725 - protein, 9 aa, synthetic construct
GGSGGGPAP

SEQ ID NO: 13726 - protein, 6 aa, synthetic construct
GGSGSS

SEQ ID NO: 13727 - protein, 16 aa, synthetic construct
SGSETPGTSESATPES

SEQ ID NO: 13728 - protein, 11 aa, synthetic construct
EAAAKGGSPAP

SEQ ID NO: 13729 - protein, 5 aa, synthetic construct
PAPAP

SEQ ID NO: 13730 - protein, 46 aa, synthetic construct; identical to SEQ ID NO: 5217

SEQ ID NO: 13731 - protein, 6 aa, synthetic construct
GGGGGS

SEQ ID NO: 13732 - protein, 10 aa, synthetic construct
EAAAKEAAAK

SEQ ID NO: 13733 - protein, 11 aa, synthetic construct
GSSGGSEAAAK

SEQ ID NO: 13734 - protein, 8 aa, synthetic construct
GGGEAAAK

SEQ ID NO: 13735 - protein, 11 aa, synthetic construct
GSSGGGEAAAK

SEQ ID NO: 13736 - skipped

SEQ ID NO: 13737 - protein, 15 aa, synthetic construct
GGGGSEAAAKGGGGS

SEQ ID NO: 13738 - protein, 4 aa, synthetic construct
GGGG

SEQ ID NO: 13739 - protein, 6 aa, synthetic construct
GGSGGS

SEQ ID NO: 13740 - protein, 9 aa, synthetic construct
GGSGGGGSS

SEQ ID NO: 13741 - protein, 9 aa, synthetic construct
GSSPAPGGS

SEQ ID NO: 13742 - protein, 11 aa, synthetic construct
GSSPAPEAAAK

SEQ ID NO: 13743 - protein, 8 aa, synthetic construct
EAAAKGGS

SEQ ID NO: 13744 - protein, 12 aa, synthetic construct
GGSGGSGGSGGS

SEQ ID NO: 13745 - protein, 11 aa, synthetic construct
GGGGSSEAAAK

SEQ ID NO: 13746 - protein, 13 aa, synthetic construct
PAPAPAPAPAPAP

SEQ ID NO: 13747 - protein, 11 aa, synthetic construct
EAAAKGSSGGG

SEQ ID NO: 13748 - protein, 5 aa, synthetic construct
GGGGG

SEQ ID NO: 13749 - protein, 46 aa, synthetic construct; identical to SEQ ID NO: 5217

SEQ ID NO: 13750 - protein, 33 aa, synthetic construct; identical to SEQ ID NO: 5006

SEQ ID NO: 13751 - protein, 9 aa, synthetic construct
GGSPAPGGG

SEQ ID NO: 13752 - protein, 11 aa, synthetic construct
GGGEAAAKGGS

SEQ ID NO: 13753 - protein, 8 aa, synthetic construct
GGGEAAAK

SEQ ID NO: 13754 - protein, 11 aa, synthetic construct
PAPEAAAKGGG

SEQ ID NO: 13755 - protein, 18 aa, synthetic construct
GSSGSSGSSGSSGSSGSS

SEQ ID NO: 13756 - protein, 46 aa, synthetic construct; identical to SEQ ID NO: 5217

SEQ ID NO: 13757 - protein, 11 aa, synthetic construct
EAAAKGGSPAP

SEQ ID NO: 13758 - protein, 10 aa, synthetic construct
EAAAKEAAAK

SEQ ID NO: 13759 - protein, 30 aa, synthetic construct; identical to SEQ ID NO: 5112

SEQ ID NO: 13760 - protein, 12 aa, synthetic construct
GGSGGSGGSGGS

SEQ ID NO: 13761 - protein, 25 aa, synthetic construct
EAAAKEAAAKEAAAKEAAAKEAAAK

SEQ ID NO: 13762 - protein, 18 aa, synthetic construct
GSSGSSGSSGSSGSSGSS

SEQ ID NO: 13763 - protein, 5 aa, synthetic construct
GGGGS

SEQ ID NO: 13764 - protein, 46 aa, synthetic construct; identical to SEQ ID NO: 5217

SEQ ID NO: 13765 - protein, 10 aa, synthetic construct
GGGGSGGGGS

SEQ ID NO: 13766 - protein, 10 aa, synthetic construct
GGGGSGGGGS

SEQ ID NO: 13767 - protein, 6 aa, synthetic construct
GGSGSS

SEQ ID NO: 13768 - protein, 9 aa, synthetic construct
GSSPAPGGG

SEQ ID NO: 13769 - protein, 9 aa, synthetic construct
GSSGGSPAP

SEQ ID NO: 13770 - protein, 6 aa, synthetic construct
PAPGGS

SEQ ID NO: 13771 - protein, 11 aa, synthetic construct
GGSPAPEAAAK

SEQ ID NO: 13772 - protein, 9 aa, synthetic construct
GGGPAPGGS

SEQ ID NO: 13773 - protein, 9 aa, synthetic construct
PAPGSSGGG

SEQ ID NO: 13774 - protein, 11 aa, synthetic construct
GSSGGGEAAAK

SEQ ID NO: 13775 - protein, 6 aa, synthetic construct
GSSGGG

SEQ ID NO: 13776 - protein, 6 aa, synthetic construct
GSSGSS

SEQ ID NO: 13777 - protein, 6 aa, synthetic construct
GSSGGG

SEQ ID NO: 13778 - protein, 9 aa, synthetic construct
PAPGGGGGS

SEQ ID NO: 13779 - protein, 8 aa, synthetic construct
GSSEAAAK

SEQ ID NO: 13780 - protein, 6 aa, synthetic construct
PAPGGG

SEQ ID NO: 13781 - protein, 10 aa, synthetic construct
GGGGSGGGGS

SEQ ID NO: 13782 - protein, 6 aa, synthetic construct
GSSGGS

SEQ ID NO: 13783 - protein, 10 aa, synthetic construct
GGGGSGGGGS

SEQ ID NO: 13784 - protein, 11 aa, synthetic construct
EAAAKGGSGSS

SEQ ID NO: 13785 - protein, 11 aa, synthetic construct
GSSEAAAKGGS

SEQ ID NO: 13786 - protein, 11 aa, synthetic construct
PAPGSSEAAAK

SEQ ID NO: 13787 - protein, 10 aa, synthetic construct
GGGGSGGGGS

SEQ ID NO: 13788 - protein, 11 aa, synthetic construct
PAPGSSEAAAK

SEQ ID NO: 13789 - protein, 11 aa, synthetic construct
PAPGSSEAAAK

SEQ ID NO: 13790 - protein, 9 aa, synthetic construct
GGSPAPGGG

SEQ ID NO: 13791 - protein, 6 aa, synthetic construct
GGGGGS

SEQ ID NO: 13792 - protein, 9 aa, synthetic construct
GGGGSSGGS

SEQ ID NO: 13793 - protein, 9 aa, synthetic construct
PAPAPAPAP

SEQ ID NO: 13794 - protein, 6 aa, synthetic construct
GGSGGS

SEQ ID NO: 13795 - protein, 9 aa, synthetic construct
GGGPAPGGS

SEQ ID NO: 13796 - protein, 15 aa, synthetic construct
GGSGGSGGSGGSGGS

SEQ ID NO: 13797 - protein, 6 aa, synthetic construct
GGSGGG

SEQ ID NO: 13798 - protein, 10 aa, synthetic construct
EAAAKEAAAK

SEQ ID NO: 13799 - protein, 6 aa, synthetic construct
PAPGSS

SEQ ID NO: 13800 - protein, 8 aa, synthetic construct
GSSEAAAK

SEQ ID NO: 13801 - protein, 9 aa, synthetic construct
GGSPAPGGG

SEQ ID NO: 13802 - protein, 8 aa, synthetic construct
EAAAKGGG

SEQ ID NO: 13803 - protein, 11 aa, synthetic construct
GSSEAAAKGGS

SEQ ID NO: 13804 - protein, 9 aa, synthetic construct
GSSGGSPAP

SEQ ID NO: 13805 - protein, 6 aa, synthetic construct
GGGGGS

SEQ ID NO: 13806 - protein, 6 aa, synthetic construct
GSSGGG

SEQ ID NO: 13807 - protein, 6 aa, synthetic construct
GSSGSS

SEQ ID NO: 13808 - protein, 11 aa, synthetic construct
GGSEAAAKPAP

SEQ ID NO: 13809 - protein, 11 aa, synthetic construct
EAAAKGGGGSS

SEQ ID NO: 13810 - protein, 11 aa, synthetic construct
EAAAKPAPGGS

SEQ ID NO: 13811 - protein, 15 aa, synthetic construct
GSSGSSGSSGSSGSS

SEQ ID NO: 13812 - protein, 15 aa, synthetic construct
GGGGSEAAAKGGGGS

SEQ ID NO: 13813 - protein, 6 aa, synthetic construct
GGSGSS

SEQ ID NO: 13814 - skipped

SEQ ID NO: 13815 - protein, 5 aa, synthetic construct
PAPAP

SEQ ID NO: 13816 - protein, 8 aa, synthetic construct
EAAAKPAP

SEQ ID NO: 13817 - protein, 25 aa, synthetic construct
EAAAKEAAAKEAAAKEAAAKEAAAK

SEQ ID NO: 13818 - protein, 7 aa, synthetic construct
GGGGGGG

SEQ ID NO: 13819 - protein, 5 aa, synthetic construct
GGGGS

SEQ ID NO: 13820 - protein, 6 aa, synthetic construct
GSSGGG

SEQ ID NO: 13821 - protein, 11 aa, synthetic construct
PAPAPAPAPAP

SEQ ID NO: 13822 - protein, 15 aa, synthetic construct
EAAAKEAAAKEAAAK

SEQ ID NO: 13823 - protein, 6 aa, synthetic construct
GSSGGS

SEQ ID NO: 13824 - protein, 11 aa, synthetic construct
EAAAKPAPGGG

SEQ ID NO: 13825 - protein, 9 aa, synthetic construct
GSSPAPGGS

SEQ ID NO: 13826 - protein, 9 aa, synthetic construct
PAPGSSGGG

SEQ ID NO: 13827 - protein, 6 aa, synthetic construct
GSSGGG

SEQ ID NO: 13828 - protein, 9 aa, synthetic construct
PAPGGSGSS

SEQ ID NO: 13829 - protein, 6 aa, synthetic construct
PAPGSS

SEQ ID NO: 13830 - protein, 9 aa, synthetic construct
GGGGGSGSS

SEQ ID NO: 13831 - protein, 11 aa, synthetic construct
EAAAKGGGGSS

SEQ ID NO: 13832 - protein, 7 aa, synthetic construct
GGGGGGG

SEQ ID NO: 13833 - protein, 11 aa, synthetic construct
PAPEAAAKGSS

SEQ ID NO: 13834 - protein, 11 aa, synthetic construct
GGSGGGEAAAK

SEQ ID NO: 13835 - protein, 11 aa, synthetic construct
EAAAKGGGGGS

SEQ ID NO: 13836 - protein, 6 aa, synthetic construct
PAPGGS

SEQ ID NO: 13837 - protein, 4 aa, synthetic construct
GGGG

SEQ ID NO: 13838 - protein, 11 aa, synthetic construct
EAAAKGGSGSS

SEQ ID NO: 13839 - protein, 9 aa, synthetic construct
GGGGSSGGS

SEQ ID NO: 13840 - protein, 8 aa, synthetic construct
GGGGGGGG

SEQ ID NO: 13841 - protein, 9 aa, synthetic construct
GGSGSSGGG

SEQ ID NO: 13842 - protein, 11 aa, synthetic construct
GSSEAAAKGGS

SEQ ID NO: 13843 - protein, 11 aa, synthetic construct
EAAAKPAPGSS

SEQ ID NO: 13844 - protein, 9 aa, synthetic construct
GGSPAPGSS

SEQ ID NO: 13845 - protein, 9 aa, synthetic construct
PAPGSSGGG

SEQ ID NO: 13846 - protein, 11 aa, synthetic construct
EAAAKPAPGSS

SEQ ID NO: 13847 - protein, 11 aa, synthetic construct
GGSPAPEAAAK

SEQ ID NO: 13848 - protein, 6 aa, synthetic construct
GSSPAP

SEQ ID NO: 13849 - skipped

SEQ ID NO: 13850 - protein, 11 aa, synthetic construct
EAAAKPAPGGS

SEQ ID NO: 13851 - protein, 9 aa, synthetic construct
GGSGSSPAP

SEQ ID NO: 13852 - protein, 9 aa, synthetic construct
PAPGSSGGS

SEQ ID NO: 13853 - protein, 12 aa, synthetic construct
GSAGSAAGSGEF

SEQ ID NO: 13854 - protein, 11 aa, synthetic construct
GSSGGSEAAAK

SEQ ID NO: 13855 - protein, 6 aa, synthetic construct
GSSGGS

SEQ ID NO: 13856 - protein, 15 aa, synthetic construct
EAAAKGGGGSEAAAK

SEQ ID NO: 13857 - protein, 6 aa, synthetic construct
GSSGGS

SEQ ID NO: 13858 - protein, 11 aa, synthetic construct
GGSPAPEAAAK

SEQ ID NO: 13859 - protein, 11 aa, synthetic construct
GGSEAAAKGSS

SEQ ID NO: 13860 - protein, 11 aa, synthetic construct
GSSPAPEAAAK

SEQ ID NO: 13861 - protein, 9 aa, synthetic construct
GGSGSSGGG

SEQ ID NO: 13862 - protein, 4 aa, synthetic construct
GGGG

SEQ ID NO: 13863 - protein, 11 aa, synthetic construct
GGSEAAAKPAP

SEQ ID NO: 13864 - protein, 9 aa, synthetic construct
GSSGGSPAP

SEQ ID NO: 13865 - protein, 11 aa, synthetic construct
GSSGGSEAAAK

SEQ ID NO: 13866 - protein, 11 aa, synthetic construct
PAPEAAAKGGS

SEQ ID NO: 13867 - protein, 6 aa, synthetic construct
GGSPAP

SEQ ID NO: 13868 - protein, 8 aa, synthetic construct
GGSEAAAK

SEQ ID NO: 13869 - protein, 15 aa, synthetic construct
EAAAKGGGGSEAAAK

SEQ ID NO: 13870 - protein, 33 aa, synthetic construct; identical to SEQ ID NO: 5006

SEQ ID NO: 13871 - protein, 8 aa, synthetic construct
GSSEAAAK

SEQ ID NO: 13872 - skipped

SEQ ID NO: 13873 - protein, 11 aa, synthetic construct
GGSEAAAKGSS

SEQ ID NO: 13874 - protein, 11 aa, synthetic construct
GGSEAAAKGSS

SEQ ID NO: 13875 - protein, 11 aa, synthetic construct
GGSPAPEAAAK

SEQ ID NO: 13876 - protein, 11 aa, synthetic construct
GGSGGGEAAAK

SEQ ID NO: 13877 - protein, 11 aa, synthetic construct
GGSEAAAKPAP

SEQ ID NO: 13878 - protein, 11 aa, synthetic construct
EAAAKGGSGSS

SEQ ID NO: 13879 - protein, 11 aa, synthetic construct
GGGEAAAKGGS

SEQ ID NO: 13880 - protein, 15 aa, synthetic construct
EAAAKGGGGSEAAAK

SEQ ID NO: 13881 - protein, 6 aa, synthetic construct
GGSPAP

SEQ ID NO: 13882 - protein, 9 aa, synthetic construct
GGGGSSGGS

SEQ ID NO: 13883-13884 - skipped (2 entries)

SEQ ID NO: 13885 - protein, 10 aa, synthetic construct
GGGGSGGGGS

SEQ ID NO: 13886 - protein, 11 aa, synthetic construct
GGGEAAAKGGS

SEQ ID NO: 13887 - protein, 18 aa, synthetic construct
GSSGSSGSSGSSGSSGSS

SEQ ID NO: 13888 - protein, 6 aa, synthetic construct
PAPGSS

SEQ ID NO: 13889 - protein, 9 aa, synthetic construct
GGSGGSGGS

SEQ ID NO: 13890 - protein, 9 aa, synthetic construct
PAPGGSGGG

SEQ ID NO: 13891 - protein, 15 aa, synthetic construct
GGGGSGGGGSGGGGS

SEQ ID NO: 13892 - protein, 9 aa, synthetic construct
GGSGSSGGG

SEQ ID NO: 13893 - protein, 9 aa, synthetic construct
GGSGGSGGS

SEQ ID NO: 13894 - protein, 11 aa, synthetic construct
GGGEAAAKGGS

SEQ ID NO: 13895 - protein, 16 aa, synthetic construct
SGSETPGTSESATPES

SEQ ID NO: 13896 - protein, 11 aa, synthetic construct
EAAAKGGGGGS

SEQ ID NO: 13897 - protein, 11 aa, synthetic construct
EAAAKGSSPAP

SEQ ID NO: 13898 - protein, 4 aa, synthetic construct
GGGG

SEQ ID NO: 13899 - protein, 25 aa, synthetic construct
GGGGSGGGGSGGGGSGGGGSGGGGS

SEQ ID NO: 13900 - protein, 9 aa, synthetic construct
GSSGGSGGG

SEQ ID NO: 13901 - protein, 6 aa, synthetic construct
GGSGSS

SEQ ID NO: 13902 - protein, 8 aa, synthetic construct
EAAAKGGS

SEQ ID NO: 13903 - protein, 11 aa, synthetic construct
GSSEAAAKGGS

SEQ ID NO: 13904 - protein, 11 aa, synthetic construct
EAAAKPAPGGG

SEQ ID NO: 13905 - protein, 9 aa, synthetic construct
PAPGSSGGG

SEQ ID NO: 13906 - protein, 11 aa, synthetic construct
GGGGSSEAAAK

SEQ ID NO: 13907 - protein, 11 aa, synthetic construct
GSSEAAAKPAP

SEQ ID NO: 13908 - protein, 11 aa, synthetic construct
PAPGGGEAAAK

SEQ ID NO: 13909 - protein, 11 aa, synthetic construct
GGSGGGEAAAK

SEQ ID NO: 13910 - protein, 30 aa, synthetic construct; identical to SEQ ID NO: 5112

SEQ ID NO: 13911 - protein, 11 aa, synthetic construct
EAAAKGGGGGS

SEQ ID NO: 13912 - protein, 9 aa, synthetic construct
GGSPAPGGG

SEQ ID NO: 13913 - protein, 9 aa, synthetic construct
GSSGSSGSS

SEQ ID NO: 13914 - protein, 5 aa, synthetic construct
EAAAK

SEQ ID NO: 13915 - protein, 9 aa, synthetic construct
GGGGSSGGS

SEQ ID NO: 13916 - protein, 9 aa, synthetic construct
GGSGSSPAP

SEQ ID NO: 13917 - protein, 20 aa, synthetic construct
EAAAKEAAAKEAAAKEAAAK

SEQ ID NO: 13918 - protein, 9 aa, synthetic construct
GGGPAPGSS

SEQ ID NO: 13919 - protein, 9 aa, synthetic construct
GSSPAPGGS

SEQ ID NO: 13920 - protein, 5 aa, synthetic construct
PAPAP

SEQ ID NO: 13921 - protein, 9 aa, synthetic construct
PAPAPAPAP

SEQ ID NO: 13922 - protein, 11 aa, synthetic construct
GGGGGSEAAAK

SEQ ID NO: 13923 - protein, 9 aa, synthetic construct
GGGGGSGSS

SEQ ID NO: 13924 - protein, 11 aa, synthetic construct
GGGEAAAKGSS

SEQ ID NO: 13925 - protein, 9 aa, synthetic construct
GGGGGSPAP

SEQ ID NO: 13926 - protein, 11 aa, synthetic construct
GGGGGSEAAAK

SEQ ID NO: 13927 - skipped

SEQ ID NO: 13928 - protein, 7 aa, synthetic construct
GGGGGGG

SEQ ID NO: 13929 - protein, 16 aa, synthetic construct
SGSETPGTSESATPES

SEQ ID NO: 13930 - protein, 11 aa, synthetic construct
EAAAKGGSGGG

SEQ ID NO: 13931 - protein, 5 aa, synthetic construct
GGGGS

SEQ ID NO: 13932 - protein, 11 aa, synthetic construct
EAAAKGSSGGG

SEQ ID NO: 13933 - protein, 11 aa, synthetic construct
EAAAKPAPGGS

SEQ ID NO: 13934 - protein, 33 aa, synthetic construct; identical to SEQ ID NO: 5006

SEQ ID NO: 13935 - protein, 9 aa, synthetic construct
GGSPAPGGG

SEQ ID NO: 13936 - protein, 12 aa, synthetic construct
GSAGSAAGSGEF

SEQ ID NO: 13937 - protein, 9 aa, synthetic construct
GGGGSSGGS

SEQ ID NO: 13938 - protein, 7 aa, synthetic construct
GGGGGGG

SEQ ID NO: 13939 - protein, 8 aa, synthetic construct
GSSEAAAK

SEQ ID NO: 13940 - protein, 6 aa, synthetic construct
PAPGSS

SEQ ID NO: 13941 - protein, 6 aa, synthetic construct
GSSGGG

SEQ ID NO: 13942 - protein, 6 aa, synthetic construct
PAPGGG

SEQ ID NO: 13943 - protein, 9 aa, synthetic construct
GGGGGSPAP

SEQ ID NO: 13944 - protein, 8 aa, synthetic construct
GGSEAAAK

SEQ ID NO: 13945 - protein, 6 aa, synthetic construct
GSSGGG

SEQ ID NO: 13946 - protein, 12 aa, synthetic construct
GGSGGSGGSGGS

SEQ ID NO: 13947 - protein, 5 aa, synthetic construct
PAPAP

SEQ ID NO: 13948 - protein, 8 aa, synthetic construct
GGSEAAAK

SEQ ID NO: 13949 - protein, 5 aa, synthetic construct
GGGGS

SEQ ID NO: 13950 - protein, 4 aa, synthetic construct
GGGG

SEQ ID NO: 13951 - protein, 11 aa, synthetic construct
EAAAKGGGGSS

SEQ ID NO: 13952 - protein, 15 aa, synthetic construct
EAAAKEAAAKEAAAK

SEQ ID NO: 13953 - protein, 11 aa, synthetic construct
PAPGGGEAAAK

SEQ ID NO: 13954 - protein, 11 aa, synthetic construct
EAAAKGGSPAP

SEQ ID NO: 13955 - protein, 11 aa, synthetic construct
GGSGSSEAAAK

SEQ ID NO: 13956 - protein, 11 aa, synthetic construct
GGSPAPEAAAK

SEQ ID NO: 13957 - protein, 7 aa, synthetic construct
GGGGGGG

SEQ ID NO: 13958 - protein, 30 aa, synthetic construct; identical to SEQ ID NO: 5130

SEQ ID NO: 13959 - protein, 11 aa, synthetic construct
EAAAKGSSGGS

SEQ ID NO: 13960 - protein, 11 aa, synthetic construct
GSSEAAAKPAP

SEQ ID NO: 13961 - protein, 6 aa, synthetic construct
GGGGSS

SEQ ID NO: 13962 - protein, 11 aa, synthetic construct
EAAAKGGSGGG

SEQ ID NO: 13963 - protein, 6 aa, synthetic construct
GGSGGS

SEQ ID NO: 13964 - protein, 9 aa, synthetic construct
GGGGGSPAP

SEQ ID NO: 13965 - protein, 15 aa, synthetic construct
EAAAKEAAAKEAAAK

SEQ ID NO: 13966 - protein, 11 aa, synthetic construct
PAPEAAAKGGS

SEQ ID NO: 13967 - protein, 11 aa, synthetic construct
GSSGGSEAAAK

SEQ ID NO: 13968 - protein, 11 aa, synthetic construct
EAAAKGGSGGG

SEQ ID NO: 13969 - protein, 9 aa, synthetic construct
GGSGGGPAP

SEQ ID NO: 13970 - skipped

SEQ ID NO: 13971 - protein, 11 aa, synthetic construct
GGSEAAAKPAP

SEQ ID NO: 13972 - protein, 8 aa, synthetic construct
EAAAKGGG

SEQ ID NO: 13973 - protein, 12 aa, synthetic construct
GSSGSSGSSGSS

SEQ ID NO: 13974 - protein, 9 aa, synthetic construct
GGSGSSPAP

SEQ ID NO: 13975 - protein, 8 aa, synthetic construct
GGGEAAAK

SEQ ID NO: 13976 - protein, 9 aa, synthetic construct
GSSPAPGGS

SEQ ID NO: 13977 - protein, 11 aa, synthetic construct
GSSEAAAKGGG

SEQ ID NO: 13978 - protein, 11 aa, synthetic construct
EAAAKPAPGGS

SEQ ID NO: 13979 - protein, 11 aa, synthetic construct
GGSGGGEAAAK

SEQ ID NO: 13980 - protein, 6 aa, synthetic construct
GGSGSS

SEQ ID NO: 13981 - protein, 11 aa, synthetic construct
GGSGGGEAAAK

SEQ ID NO: 13982 - protein, 18 aa, synthetic construct
GGSGGSGGSGGSGGSGGS

SEQ ID NO: 13983 - protein, 11 aa, synthetic construct
PAPEAAAKGSS

SEQ ID NO: 13984 - protein, 11 aa, synthetic construct
EAAAKGSSGGS

SEQ ID NO: 13985 - protein, 11 aa, synthetic construct
GGSGSSEAAAK

SEQ ID NO: 13986 - protein, 11 aa, synthetic construct
GGSGSSEAAAK

SEQ ID NO: 13987 - protein, 9 aa, synthetic construct
GSSGGSGGG

SEQ ID NO: 13988 - protein, 11 aa, synthetic construct
EAAAKGGSGGG

SEQ ID NO: 13989 - protein, 6 aa, synthetic construct
GGSGGS

SEQ ID NO: 13990 - protein, 12 aa, synthetic construct
GSAGSAAGSGEF

SEQ ID NO: 13991 - protein, 6 aa, synthetic construct
GGSGSS

SEQ ID NO: 13992 - protein, 4 aa, synthetic construct
GGGG

SEQ ID NO: 13993 - protein, 20 aa, synthetic construct
GGGGSGGGGSGGGGSGGGGS

SEQ ID NO: 13994 - protein, 16 aa, synthetic construct
SGSETPGTSESATPES

SEQ ID NO: 13995 - protein, 20 aa, synthetic construct
EAAAKEAAAKEAAAKEAAAK

SEQ ID NO: 13996 - protein, 11 aa, synthetic construct
GGGEAAAKGGS

SEQ ID NO: 13997 - protein, 11 aa, synthetic construct
GSSGGSEAAAK

SEQ ID NO: 13998 - protein, 11 aa, synthetic construct
EAAAKGGGGSS

SEQ ID NO: 13999 - protein, 11 aa, synthetic construct
PAPGGSEAAAK

SEQ ID NO: 14000 - protein, 5 aa, synthetic construct
EAAAK

SEQ ID NO: 14001 - protein, 18 aa, synthetic construct
GSSGSSGSSGSSGSSGSS

SEQ ID NO: 14002 - protein, 4 aa, synthetic construct
GGGG

SEQ ID NO: 14003 - protein, 6 aa, synthetic construct
GSSGSS

SEQ ID NO: 14004 - protein, 9 aa, synthetic construct
GSSGGSPAP

SEQ ID NO: 14005 - protein, 9 aa, synthetic construct
GGSGGSGGS

SEQ ID NO: 14006 - protein, 11 aa, synthetic construct
EAAAKGGGPAP

SEQ ID NO: 14007 - protein, 10 aa, synthetic construct
GGGGSGGGGS

SEQ ID NO: 14008 - protein, 11 aa, synthetic construct
GGSEAAAKGSS

SEQ ID NO: 14009 - protein, 30 aa, synthetic construct; identical to SEQ ID NO: 5130

SEQ ID NO: 14010 - protein, 11 aa, synthetic construct
GGSGSSEAAAK

SEQ ID NO: 14011 - protein, 20 aa, synthetic construct
EAAAKEAAAKEAAAKEAAAK

SEQ ID NO: 14012 - protein, 11 aa, synthetic construct
GSSEAAAKGGS

SEQ ID NO: 14013 - protein, 6 aa, synthetic construct
GGSGSS

SEQ ID NO: 14014 - protein, 11 aa, synthetic construct
GGSGSSEAAAK

SEQ ID NO: 14015 - protein, 9 aa, synthetic construct
GSSGSSGSS

SEQ ID NO: 14016 - protein, 11 aa, synthetic construct
EAAAKGSSPAP

SEQ ID NO: 14017 - protein, 8 aa, synthetic construct
EAAAKPAP

SEQ ID NO: 14018 - protein, 11 aa, synthetic construct
GGSGSSEAAAK

SEQ ID NO: 14019 - protein, 30 aa, synthetic construct; identical to SEQ ID NO: 5112

SEQ ID NO: 14020 - protein, 15 aa, synthetic construct
GGGGSGGGGSGGGGS

SEQ ID NO: 14021 - protein, 7 aa, synthetic construct
GGGGGGG

SEQ ID NO: 14022 - protein, 8 aa, synthetic construct
EAAAKGSS

SEQ ID NO: 14023 - protein, 11 aa, synthetic construct
EAAAKGGGPAP

SEQ ID NO: 14024 - protein, 6 aa, synthetic construct
GSSGSS

SEQ ID NO: 14025 - protein, 11 aa, synthetic construct
EAAAKGGGGGS

SEQ ID NO: 14026 - protein, 11 aa, synthetic construct
GGSGGGEAAAK

SEQ ID NO: 14027 - protein, 6 aa, synthetic construct
PAPGSS

SEQ ID NO: 14028 - protein, 6 aa, synthetic construct
PAPGSS

SEQ ID NO: 14029 - protein, 9 aa, synthetic construct
GGSPAPGSS

SEQ ID NO: 14030 - protein, 11 aa, synthetic construct
GGGGSSEAAAK

SEQ ID NO: 14031 - protein, 9 aa, synthetic construct
GSSGGGGGS

SEQ ID NO: 14032 - protein, 11 aa, synthetic construct
EAAAKGSSPAP

SEQ ID NO: 14033 - protein, 9 aa, synthetic construct
GSSPAPGGS

SEQ ID NO: 14034 - protein, 6 aa, synthetic construct
GGGGGG

SEQ ID NO: 14035 - protein, 11 aa, synthetic construct
EAAAKGGGGSS

SEQ ID NO: 14036 - protein, 11 aa, synthetic construct
PAPGGSEAAAK

SEQ ID NO: 14037 - protein, 33 aa, synthetic construct; identical to SEQ ID NO: 5006

SEQ ID NO: 14038 - protein, 12 aa, synthetic construct
GSSGSSGSSGSS

SEQ ID NO: 14039 - protein, 11 aa, synthetic construct
EAAAKGSSGGG

SEQ ID NO: 14040 - protein, 11 aa, synthetic construct
GGSEAAAKPAP

SEQ ID NO: 14041 - protein, 15 aa, synthetic construct
GSSGSSGSSGSSGSS

SEQ ID NO: 14042 - protein, 11 aa, synthetic construct
GGGEAAAKPAP

SEQ ID NO: 14043 - protein, 9 aa, synthetic construct
PAPGSSGGG

SEQ ID NO: 14044 - protein, 6 aa, synthetic construct
GSSGSS

SEQ ID NO: 14045 - protein, 8 aa, synthetic construct
PAPEAAAK

SEQ ID NO: 14046 - protein, 9 aa, synthetic construct
GGGPAPGSS

SEQ ID NO: 14047 - protein, 9 aa, synthetic construct
GSSGGSPAP

SEQ ID NO: 14048 - protein, 6 aa, synthetic construct
GGGGSS

SEQ ID NO: 14049 - protein, 11 aa, synthetic construct
PAPEAAAKGSS

SEQ ID NO: 14050 - protein, 9 aa, synthetic construct
GGSGGGPAP

SEQ ID NO: 14051 - protein, 6 aa, synthetic construct
PAPGGS

SEQ ID NO: 14052 - protein, 11 aa, synthetic construct
EAAAKGGGGGS

SEQ ID NO: 14053 - protein, 9 aa, synthetic construct
GSSGGSPAP

SEQ ID NO: 14054 - protein, 9 aa, synthetic construct
GSSGGGGGS

SEQ ID NO: 14055 - protein, 11 aa, synthetic construct
GGGEAAAKGGS

SEQ ID NO: 14056 - protein, 11 aa, synthetic construct
GGGEAAAKGSS

SEQ ID NO: 14057 - protein, 11 aa, synthetic construct
PAPEAAAKGSS

SEQ ID NO: 14058 - protein, 15 aa, synthetic construct
GSSGSSGSSGSSGSS

SEQ ID NO: 14059 - protein, 9 aa, synthetic construct
GGSPAPGSS

SEQ ID NO: 14060 - protein, 11 aa, synthetic construct
EAAAKGSSPAP

SEQ ID NO: 14061 - protein, 18 aa, synthetic construct
GGSGGSGGSGGSGGSGGS

SEQ ID NO: 14062 - protein, 11 aa, synthetic construct
GGGGSSEAAAK

SEQ ID NO: 14063 - protein, 9 aa, synthetic construct
GGGGSSPAP

SEQ ID NO: 14064 - protein, 9 aa, synthetic construct
GSSGGSPAP

SEQ ID NO: 14065 - protein, 9 aa, synthetic construct
GGGPAPGSS

SEQ ID NO: 14066 - protein, 9 aa, synthetic construct
PAPGSSGGS

SEQ ID NO: 14067 - protein, 9 aa, synthetic construct
GGGGGSPAP

SEQ ID NO: 14068 - protein, 16 aa, synthetic construct
SGSETPGTSESATPES

SEQ ID NO: 14069 - protein, 15 aa, synthetic construct
GSSGSSGSSGSSGSS

SEQ ID NO: 14070 - protein, 9 aa, synthetic construct
GSSPAPGGG

SEQ ID NO: 14071 - protein, 13 aa, synthetic construct
PAPAPAPAPAPAP

SEQ ID NO: 14072 - protein, 9 aa, synthetic construct
GGGPAPGGS

SEQ ID NO: 14073 - protein, 11 aa, synthetic construct
PAPGGSEAAAK

SEQ ID NO: 14074 - protein, 11 aa, synthetic construct
GGGGSSEAAAK

SEQ ID NO: 14075 - protein, 9 aa, synthetic construct
GGSPAPGGG

SEQ ID NO: 14076 - protein, 11 aa, synthetic construct
GSSPAPEAAAK

SEQ ID NO: 14077 - protein, 8 aa, synthetic construct
GGGEAAAK

SEQ ID NO: 14078 - protein, 11 aa, synthetic construct
PAPEAAAKGGG

SEQ ID NO: 14079 - protein, 9 aa, synthetic construct
GGSPAPGGG

SEQ ID NO: 14080 - protein, 9 aa, synthetic construct
GGSGGGGSS

SEQ ID NO: 14081 - protein, 11 aa, synthetic construct
GSSPAPEAAAK

SEQ ID NO: 14082 - protein, 9 aa, synthetic construct
GGSPAPGGG

SEQ ID NO: 14083 - protein, 9 aa, synthetic construct
PAPGGSGSS

SEQ ID NO: 14084 - protein, 6 aa, synthetic construct
GSSPAP

SEQ ID NO: 14085 - protein, 16 aa, synthetic construct
SGSETPGTSESATPES

SEQ ID NO: 14086 - protein, 9 aa, synthetic construct
GSSGSSGSS

SEQ ID NO: 14087 - protein, 9 aa, synthetic construct
PAPGSSGGS

SEQ ID NO: 14088 - protein, 6 aa, synthetic construct
PAPGGS

SEQ ID NO: 14089 - protein, 11 aa, synthetic construct
PAPEAAAKGGG

SEQ ID NO: 14090 - protein, 9 aa, synthetic construct
GGSGGSGGS

SEQ ID NO: 14091 - protein, 6 aa, synthetic construct
PAPGGS

SEQ ID NO: 14092 - protein, 9 aa, synthetic construct
GSSGGSPAP

SEQ ID NO: 14093 - protein, 9 aa, synthetic construct
GSSGGGGGS

SEQ ID NO: 14094 - protein, 9 aa, synthetic construct
GGGGGSPAP

SEQ ID NO: 14095 - protein, 11 aa, synthetic construct
EAAAKPAPGSS

SEQ ID NO: 14096 - protein, 11 aa, synthetic construct
EAAAKGGSPAP

SEQ ID NO: 14097 - protein, 11 aa, synthetic construct
GGGPAPEAAAK

SEQ ID NO: 14098 - protein, 11 aa, synthetic construct
GGSEAAAKGSS

SEQ ID NO: 14099 - protein, 11 aa, synthetic construct
PAPEAAAKGSS

SEQ ID NO: 14100 - protein, 11 aa, synthetic construct
PAPEAAAKGGS

SEQ ID NO: 14101 - protein, 6 aa, synthetic construct
GSSGGG

SEQ ID NO: 14102 - protein, 11 aa, synthetic construct
EAAAKGGGGSS

SEQ ID NO: 14103 - protein, 11 aa, synthetic construct
EAAAKGGSPAP

SEQ ID NO: 14104 - protein, 9 aa, synthetic construct
GGGGSSGGS

SEQ ID NO: 14105 - protein, 11 aa, synthetic construct
PAPEAAAKGSS

SEQ ID NO: 14106 - protein, 11 aa, synthetic construct
EAAAKGGGGGS

SEQ ID NO: 14107 - protein, 9 aa, synthetic construct
GSSGGGGGS

SEQ ID NO: 14108 - protein, 9 aa, synthetic construct
PAPAPAPAP

SEQ ID NO: 14109 - protein, 12 aa, synthetic construct
GGSGGSGGSGGS

SEQ ID NO: 14110 - protein, 9 aa, synthetic construct
PAPAPAPAP

SEQ ID NO: 14111 - protein, 11 aa, synthetic construct
GSSEAAAKPAP

SEQ ID NO: 14112 - protein, 11 aa, synthetic construct
GGSGGGEAAAK

SEQ ID NO: 14113 - protein, 9 aa, synthetic construct
GSSGGSGGG

SEQ ID NO: 14114 - protein, 9 aa, synthetic construct
GGGGGSPAP

SEQ ID NO: 14115 - protein, 11 aa, synthetic construct
GGGEAAAKGSS

SEQ ID NO: 14116 - protein, 9 aa, synthetic construct
GGGGSSPAP

SEQ ID NO: 14117 - protein, 6 aa, synthetic construct
GGSGGG

SEQ ID NO: 14118 - protein, 6 aa, synthetic construct
GGGGSS

SEQ ID NO: 14119 - protein, 11 aa, synthetic construct
EAAAKGSSGGS

SEQ ID NO: 14120 - protein, 9 aa, synthetic construct
GSSGGGGGS

SEQ ID NO: 14121 - protein, 11 aa, synthetic construct
EAAAKGSSGGS

SEQ ID NO: 14122 - protein, 10 aa, synthetic construct
EAAAKEAAAK

SEQ ID NO: 14123 - protein, 11 aa, synthetic construct
GSSGGGEAAAK

SEQ ID NO: 14124 - protein, 9 aa, synthetic construct
GSSPAPGGG

SEQ ID NO: 14125 - protein, 15 aa, synthetic construct
GGGGSGGGGSGGGGS

SEQ ID NO: 14126 - protein, 20 aa, synthetic construct
EAAAKEAAAKEAAAKEAAAK

SEQ ID NO: 14127 - protein, 11 aa, synthetic construct
EAAAKGGSGSS

SEQ ID NO: 14128 - protein, 8 aa, synthetic construct
PAPEAAAK

SEQ ID NO: 14129 - protein, 6 aa, synthetic construct
GSSGGG

SEQ ID NO: 14130 - protein, 11 aa, synthetic construct
GGSGGGEAAAK

SEQ ID NO: 14131 - protein, 5 aa, synthetic construct
EAAAK

SEQ ID NO: 14132 - protein, 9 aa, synthetic construct
GGGGSSPAP

SEQ ID NO: 14133 - skipped

SEQ ID NO: 14134 - protein, 11 aa, synthetic construct
PAPEAAAKGSS

SEQ ID NO: 14135 - protein, 9 aa, synthetic construct
GGGGGSPAP

SEQ ID NO: 14136 - protein, 9 aa, synthetic construct
GSSGSSGSS

SEQ ID NO: 14137 - protein, 20 aa, synthetic construct
GGGGSGGGGSGGGGSGGGGS

SEQ ID NO: 14138 - protein, 11 aa, synthetic construct
GGGGSSEAAAK

SEQ ID NO: 14139 - protein, 20 aa, synthetic construct
GGGGSGGGGSGGGGSGGGGS

SEQ ID NO: 14140 - protein, 11 aa, synthetic construct
PAPGSSEAAAK

SEQ ID NO: 14141 - protein, 9 aa, synthetic construct
GGGGGSGSS

SEQ ID NO: 14142 - protein, 11 aa, synthetic construct
GGSEAAAKGGG

SEQ ID NO: 14143 - protein, 9 aa, synthetic construct
PAPGSSGGG

SEQ ID NO: 14144 - skipped

SEQ ID NO: 14145 - protein, 11 aa, synthetic construct
EAAAKGGSGSS

SEQ ID NO: 14146 - protein, 8 aa, synthetic construct
GGGEAAAK

SEQ ID NO: 14147 - protein, 11 aa, synthetic construct
GGSEAAAKPAP

SEQ ID NO: 14148 - protein, 16 aa, synthetic construct
SGSETPGTSESATPES

SEQ ID NO: 14149 - protein, 11 aa, synthetic construct
EAAAKPAPGGS

SEQ ID NO: 14150 - protein, 11 aa, synthetic construct
EAAAKGGGGGS

SEQ ID NO: 14151 - protein, 5 aa, synthetic construct
GGGGS

SEQ ID NO: 14152 - protein, 11 aa, synthetic construct
GGSEAAAKGSS

SEQ ID NO: 14153 - protein, 11 aa, synthetic construct
GGSEAAAKGGG

SEQ ID NO: 14154 - protein, 18 aa, synthetic construct
GGSGGSGGSGGSGGSGGS

SEQ ID NO: 14155 - protein, 11 aa, synthetic construct
GGSEAAAKGSS

SEQ ID NO: 14156 - protein, 11 aa, synthetic construct
GGGEAAAKPAP

SEQ ID NO: 14157 - protein, 8 aa, synthetic construct
GGSEAAAK

SEQ ID NO: 14158 - protein, 9 aa, synthetic construct
GGSPAPGSS

SEQ ID NO: 14159 - protein, 11 aa, synthetic construct
GSSPAPEAAAK

SEQ ID NO: 14160 - protein, 6 aa, synthetic construct
GGSGSS

SEQ ID NO: 14161 - protein, 9 aa, synthetic construct
PAPGGGGGS

SEQ ID NO: 14162 - protein, 11 aa, synthetic construct
PAPEAAAKGSS

SEQ ID NO: 14163 - protein, 11 aa, synthetic construct
GGSGGGEAAAK

SEQ ID NO: 14164 - protein, 6 aa, synthetic construct
PAPGGG

SEQ ID NO: 14165 - protein, 8 aa, synthetic construct
EAAAKGGG

SEQ ID NO: 14166 - protein, 12 aa, synthetic construct
GSSGSSGSSGSS

SEQ ID NO: 14167 - protein, 11 aa, synthetic construct
EAAAKGGSGGG

SEQ ID NO: 14168 - protein, 9 aa, synthetic construct
GSSPAPGGS

SEQ ID NO: 14169 - protein, 9 aa, synthetic construct
GSSPAPGGS

SEQ ID NO: 14170 - protein, 6 aa, synthetic construct
GGGPAP

SEQ ID NO: 14171 - protein, 6 aa, synthetic construct
GGGPAP

SEQ ID NO: 14172 - protein, 9 aa, synthetic construct
GGSPAPGSS

SEQ ID NO: 14173 - protein, 5 aa, synthetic construct
PAPAP

SEQ ID NO: 14174 - protein, 7 aa, synthetic construct
GGGGGGG

SEQ ID NO: 14175 - protein, 5 aa, synthetic construct
GGGGG

SEQ ID NO: 14176 - protein, 12 aa, synthetic construct
GSAGSAAGSGEF

SEQ ID NO: 14177 - protein, 5 aa, synthetic construct
PAPAP

SEQ ID NO: 14178 - protein, 11 aa, synthetic construct
GGSEAAAKGGG

SEQ ID NO: 14179 - protein, 5 aa, synthetic construct
PAPAP

SEQ ID NO: 14180 - protein, 15 aa, synthetic construct
GGGGSGGGGSGGGGS

SEQ ID NO: 14181 - protein, 6 aa, synthetic construct
PAPGGS

SEQ ID NO: 14182 - protein, 11 aa, synthetic construct
GGGEAAAKPAP

SEQ ID NO: 14183 - protein, 6 aa, synthetic construct
GGGGGS

SEQ ID NO: 14184 - protein, 11 aa, synthetic construct
GSSEAAAKGGG

SEQ ID NO: 14185 - protein, 11 aa, synthetic construct
EAAAKGGGGSS

SEQ ID NO: 14186 - protein, 6 aa, synthetic construct
GSSGGS

SEQ ID NO: 14187 - protein, 6 aa, synthetic construct
GSSGGG

SEQ ID NO: 14188 - protein, 7 aa, synthetic construct
PAPAPAP

SEQ ID NO: 14189 - protein, 4 aa, synthetic construct
GGGG

SEQ ID NO: 14190 - protein, 11 aa, synthetic construct
EAAAKPAPGGS

SEQ ID NO: 14191 - protein, 10 aa, synthetic construct
GGGGSGGGGS

SEQ ID NO: 14192 - protein, 8 aa, synthetic construct
EAAAKGGG

SEQ ID NO: 14193 - protein, 9 aa, synthetic construct
GGGGSSPAP

SEQ ID NO: 14194 - protein, 11 aa, synthetic construct
GSSEAAAKGGG

SEQ ID NO: 14195 - protein, 5 aa, synthetic construct
GGGGG

SEQ ID NO: 14196 - protein, 11 aa, synthetic construct
GGGEAAAKGSS

SEQ ID NO: 14197 - protein, 9 aa, synthetic construct
GSSGSSGSS

SEQ ID NO: 14198 - protein, 9 aa, synthetic construct
GSSGGSPAP

SEQ ID NO: 14199 - protein, 8 aa, synthetic construct
EAAAKGGS

SEQ ID NO: 14200 - protein, 11 aa, synthetic construct
GGSPAPEAAAK

SEQ ID NO: 14201 - protein, 8 aa, synthetic construct
GGSEAAAK

SEQ ID NO: 14202 - protein, 6 aa, synthetic construct
GSSGGS

SEQ ID NO: 14203 - protein, 11 aa, synthetic construct
GGGPAPEAAAK

SEQ ID NO: 14204 - protein, 6 aa, synthetic construct
PAPGSS

SEQ ID NO: 14205 - protein, 11 aa, synthetic construct
GGSEAAAKGSS

SEQ ID NO: 14206 - protein, 25 aa, synthetic construct
EAAAKEAAAKEAAAKEAAAKEAAAK

SEQ ID NO: 14207 - protein, 11 aa, synthetic construct
GSSEAAAKGGG

SEQ ID NO: 14208 - protein, 15 aa, synthetic construct
GGGGSEAAAKGGGGS

SEQ ID NO: 14209 - protein, 9 aa, synthetic construct
GGSGGSGGS

SEQ ID NO: 14210 - protein, 9 aa, synthetic construct
GGGGGSGSS

SEQ ID NO: 14211 - protein, 20 aa, synthetic construct
GGGGSGGGGSGGGGSGGGGS

SEQ ID NO: 14212 - protein, 8 aa, synthetic construct
EAAAKGGG

SEQ ID NO: 14213 - protein, 11 aa, synthetic construct
GGSEAAAKGGG

SEQ ID NO: 14214 - protein, 9 aa, synthetic construct
GSSGGSGGG

SEQ ID NO: 14215 - protein, 6 aa, synthetic construct
GGGGGS

SEQ ID NO: 14216 - protein, 12 aa, synthetic construct
GSAGSAAGSGEF

SEQ ID NO: 14217 - protein, 11 aa, synthetic construct
PAPEAAAKGSS

SEQ ID NO: 14218 - protein, 9 aa, synthetic construct
GSSPAPGGG

SEQ ID NO: 14219 - protein, 9 aa, synthetic construct
GGGGSSPAP

SEQ ID NO: 14220 - protein, 9 aa, synthetic construct
PAPGGSGGG

SEQ ID NO: 14221 - protein, 6 aa, synthetic construct
GSSPAP

SEQ ID NO: 14222 - protein, 6 aa, synthetic construct
PAPGSS

SEQ ID NO: 14223 - protein, 9 aa, synthetic construct
GGSGGGGSS

SEQ ID NO: 14224 - protein, 6 aa, synthetic construct
GSSGGS

SEQ ID NO: 14225 - protein, 11 aa, synthetic construct
EAAAKGGGGGS

SEQ ID NO: 14226 - protein, 5 aa, synthetic construct
GGGGG

SEQ ID NO: 14227 - protein, 8 aa, synthetic construct
EAAAKGSS

SEQ ID NO: 14228 - protein, 25 aa, synthetic construct
EAAAKEAAAKEAAAKEAAAKEAAAK

SEQ ID NO: 14229 - protein, 20 aa, synthetic construct
EAAAKEAAAKEAAAKEAAAK

SEQ ID NO: 14230 - protein, 12 aa, synthetic construct
GSAGSAAGSGEF

SEQ ID NO: 14231 - protein, 9 aa, synthetic construct
GGGPAPGGS

SEQ ID NO: 14232 - protein, 11 aa, synthetic construct
GGSEAAAKGGG

SEQ ID NO: 14233 - protein, 11 aa, synthetic construct
PAPGGGEAAAK

SEQ ID NO: 14234 - protein, 11 aa, synthetic construct
EAAAKPAPGSS

SEQ ID NO: 14235 - protein, 8 aa, synthetic construct
GGSEAAAK

SEQ ID NO: 14236 - protein, 6 aa, synthetic construct
GGSGSS

SEQ ID NO: 14237 - protein, 11 aa, synthetic construct
GGSPAPEAAAK

SEQ ID NO: 14238 - protein, 5 aa, synthetic construct
GGGGS

SEQ ID NO: 14239 - protein, 9 aa, synthetic construct
GGSPAPGGG

SEQ ID NO: 14240 - protein, 11 aa, synthetic construct
EAAAKPAPGGS

SEQ ID NO: 14241 - protein, 6 aa, synthetic construct
GSSPAP

SEQ ID NO: 14242 - protein, 9 aa, synthetic construct
GGSGSSGGG

SEQ ID NO: 14243 - protein, 6 aa, synthetic construct
PAPGGG

SEQ ID NO: 14244 - protein, 11 aa, synthetic construct
GSSGGSEAAAK

SEQ ID NO: 14245 - protein, 8 aa, synthetic construct
GGSEAAAK

SEQ ID NO: 14246 - protein, 9 aa, synthetic construct
GGGPAPGGS

SEQ ID NO: 14247 - protein, 12 aa, synthetic construct
GSAGSAAGSGEF

SEQ ID NO: 14248 - protein, 11 aa, synthetic construct
EAAAKPAPGGS

SEQ ID NO: 14249 - protein, 6 aa, synthetic construct
PAPGGG

SEQ ID NO: 14250 - protein, 11 aa, synthetic construct
GSSPAPEAAAK

SEQ ID NO: 14251 - protein, 8 aa, synthetic construct
PAPEAAAK

SEQ ID NO: 14252 - protein, 9 aa, synthetic construct
PAPGGGGGS

SEQ ID NO: 14253 - protein, 11 aa, synthetic construct
GGSEAAAKPAP

SEQ ID NO: 14254 - protein, 8 aa, synthetic construct
EAAAKGSS

SEQ ID NO: 14255 - protein, 8 aa, synthetic construct
GGGEAAAK

SEQ ID NO: 14256 - protein, 15 aa, synthetic construct
EAAAKEAAAKEAAAK

SEQ ID NO: 14257 - protein, 11 aa, synthetic construct
PAPEAAAKGGG

SEQ ID NO: 14258 - protein, 7 aa, synthetic construct
PAPAPAP

SEQ ID NO: 14259 - protein, 11 aa, synthetic construct
EAAAKPAPGGS

SEQ ID NO: 14260 - protein, 10 aa, synthetic construct
GGGGSGGGGS

SEQ ID NO: 14261 - protein, 15 aa, synthetic construct
GGGGSEAAAKGGGGS

SEQ ID NO: 14262 - protein, 5 aa, synthetic construct
EAAAK

SEQ ID NO: 14263 - protein, 7 aa, synthetic construct
PAPAPAP

SEQ ID NO: 14264 - protein, 15 aa, synthetic construct
GGGGSEAAAKGGGGS

SEQ ID NO: 14265 - protein, 11 aa, synthetic construct
GGSPAPEAAAK

SEQ ID NO: 14266 - protein, 9 aa, synthetic construct
GGSGSSGGG

SEQ ID NO: 14267 - protein, 9 aa, synthetic construct
GGSPAPGSS

SEQ ID NO: 14268 - protein, 33 aa, synthetic construct; identical to SEQ ID NO: 5006

SEQ ID NO: 14269 - protein, 11 aa, synthetic construct
EAAAKGGGPAP

SEQ ID NO: 14270 - protein, 11 aa, synthetic construct
GSSGGSEAAAK

SEQ ID NO: 14271 - protein, 16 aa, synthetic construct
SGSETPGTSESATPES

SEQ ID NO: 14272 - protein, 25 aa, synthetic construct
EAAAKEAAAKEAAAKEAAAKEAAAK

SEQ ID NO: 14273 - protein, 9 aa, synthetic construct
GSSGSSGSS

SEQ ID NO: 14274 - protein, 9 aa, synthetic construct
GSSPAPGGG

SEQ ID NO: 14275 - protein, 11 aa, synthetic construct
GSSGGGEAAAK

SEQ ID NO: 14276 - protein, 9 aa, synthetic construct
GGSGGGGSS

SEQ ID NO: 14277 - protein, 11 aa, synthetic construct
GSSGGGEAAAK

SEQ ID NO: 14278 - protein, 11 aa, synthetic construct
GSSEAAAKGGG

SEQ ID NO: 14279 - protein, 9 aa, synthetic construct
GGSGGGGSS

SEQ ID NO: 14280 - protein, 9 aa, synthetic construct
GGSGSSPAP

SEQ ID NO: 14281 - protein, 6 aa, synthetic construct
GSSPAP

SEQ ID NO: 14282 - protein, 11 aa, synthetic construct
GGGGSSEAAAK

SEQ ID NO: 14283 - skipped

SEQ ID NO: 14284 - protein, 10 aa, synthetic construct
EAAAKEAAAK

SEQ ID NO: 14285 - protein, 9 aa, synthetic construct
PAPAPAPAP

SEQ ID NO: 14286 - protein, 11 aa, synthetic construct
GGSEAAAKGGG

SEQ ID NO: 14287 - protein, 6 aa, synthetic construct
PAPGGG

SEQ ID NO: 14288 - protein, 8 aa, synthetic construct
EAAAKGSS

SEQ ID NO: 14289 - protein, 10 aa, synthetic construct
GGGGSGGGGS

SEQ ID NO: 14290 - protein, 9 aa, synthetic construct
GGSGGSGGS

SEQ ID NO: 14291 - protein, 5 aa, synthetic construct
EAAAK

SEQ ID NO: 14292 - protein, 9 aa, synthetic construct
GGGGSSGGS

SEQ ID NO: 14293 - protein, 11 aa, synthetic construct
GGGPAPEAAAK

SEQ ID NO: 14294 - protein, 15 aa, synthetic construct
EAAAKEAAAKEAAAK

SEQ ID NO: 14295 - protein, 11 aa, synthetic construct
GSSEAAAKGGG

SEQ ID NO: 14296 - protein, 9 aa, synthetic construct
GGGPAPGGS

SEQ ID NO: 14297 - protein, 11 aa, synthetic construct
GGSEAAAKGGG

SEQ ID NO: 14298 - protein, 11 aa, synthetic construct
EAAAKGGGGGS

SEQ ID NO: 14299 - protein, 11 aa, synthetic construct
EAAAKGGSGGG

SEQ ID NO: 14300 - protein, 11 aa, synthetic construct
GGSEAAAKGGG

SEQ ID NO: 14301 - protein, 5 aa, synthetic construct
GGGGS

SEQ ID NO: 14302 - protein, 6 aa, synthetic construct
GSSGGS

SEQ ID NO: 14303 - protein, 6 aa, synthetic construct
GSSGSS

SEQ ID NO: 14304 - protein, 9 aa, synthetic construct
GGSPAPGGG

SEQ ID NO: 14305 - protein, 9 aa, synthetic construct
GSSGGGGGS

SEQ ID NO: 14306 - protein, 9 aa, synthetic construct
PAPAPAPAP

SEQ ID NO: 14307 - protein, 5 aa, synthetic construct
PAPAP

SEQ ID NO: 14308 - protein, 9 aa, synthetic construct
PAPGSSGGS

SEQ ID NO: 14309 - protein, 9 aa, synthetic construct
PAPGSSGGG

SEQ ID NO: 14310 - protein, 8 aa, synthetic construct
GGGEAAAK

SEQ ID NO: 14311 - protein, 15 aa, synthetic construct
GGSGGSGGSGGSGGS

SEQ ID NO: 14312 - protein, 6 aa, synthetic construct
GGSGGG

SEQ ID NO: 14313 - protein, 11 aa, synthetic construct
PAPEAAAKGGG

SEQ ID NO: 14314 - skipped

SEQ ID NO: 14315 - protein, 9 aa, synthetic construct
PAPGGSGSS

SEQ ID NO: 14316 - protein, 30 aa, synthetic construct; identical to SEQ ID NO: 5130

SEQ ID NO: 14317 - protein, 12 aa, synthetic construct
GSSGSSGSSGSS

SEQ ID NO: 14318 - protein, 15 aa, synthetic construct
GSSGSSGSSGSSGSS

SEQ ID NO: 14319 - protein, 11 aa, synthetic construct
GGGEAAAKPAP

SEQ ID NO: 14320 - protein, 9 aa, synthetic construct
PAPGSSGGG

SEQ ID NO: 14321 - protein, 9 aa, synthetic construct
PAPGGSGSS

SEQ ID NO: 14322 - protein, 11 aa, synthetic construct
PAPAPAPAPAP

SEQ ID NO: 14323 - protein, 11 aa, synthetic construct
GGSGGGEAAAK

SEQ ID NO: 14324 - protein, 6 aa, synthetic construct
GSSPAP

SEQ ID NO: 14325 - protein, 8 aa, synthetic construct
EAAAKPAP

SEQ ID NO: 14326 - protein, 20 aa, synthetic construct
GGGGSGGGGSGGGGSGGGGS

SEQ ID NO: 14327 - protein, 6 aa, synthetic construct
GGSGGG

SEQ ID NO: 14328 - protein, 9 aa, synthetic construct
GGSGGSGGS

SEQ ID NO: 14329 - protein, 8 aa, synthetic construct
GGGGGGGG

SEQ ID NO: 14330 - protein, 6 aa, synthetic construct
GGGGSS

SEQ ID NO: 14331 - protein, 9 aa, synthetic construct
GSSGGGGGS

SEQ ID NO: 14332 - protein, 30 aa, synthetic construct; identical to SEQ ID NO: 5130

SEQ ID NO: 14333 - protein, 9 aa, synthetic construct
GSSGSSGSS

SEQ ID NO: 14334 - protein, 9 aa, synthetic construct
GSSPAPGGS

SEQ ID NO: 14335 - protein, 7 aa, synthetic construct
PAPAPAP

SEQ ID NO: 14336 - protein, 20 aa, synthetic construct
EAAAKEAAAKEAAAKEAAAK

SEQ ID NO: 14337 - protein, 9 aa, synthetic construct
PAPAPAPAP

SEQ ID NO: 14338 - protein, 6 aa, synthetic construct
GGGGSS

SEQ ID NO: 14339 - protein, 15 aa, synthetic construct
GSSGSSGSSGSSGSS

SEQ ID NO: 14340 - protein, 6 aa, synthetic construct
PAPGGS

SEQ ID NO: 14341 - protein, 11 aa, synthetic construct
GSSEAAAKGGG

SEQ ID NO: 14342 - protein, 9 aa, synthetic construct
GSSGGSPAP

SEQ ID NO: 14343 - protein, 18 aa, synthetic construct
GSSGSSGSSGSSGSSGSS

SEQ ID NO: 14344 - protein, 9 aa, synthetic construct
GGSGSSGGG

SEQ ID NO: 14345 - protein, 9 aa, synthetic construct
GGGPAPGSS

SEQ ID NO: 14346 - protein, 11 aa, synthetic construct
GSSEAAAKGGS

SEQ ID NO: 14347 - protein, 11 aa, synthetic construct
GSSEAAAKGGG

SEQ ID NO: 14348 - protein, 9 aa, synthetic construct
GGSGGGPAP

SEQ ID NO: 14349 - protein, 6 aa, synthetic construct
GSSGSS

SEQ ID NO: 14350 - protein, 9 aa, synthetic construct
PAPGGGGGS

SEQ ID NO: 14351 - protein, 11 aa, synthetic construct
EAAAKPAPGGS

SEQ ID NO: 14352 - protein, 6 aa, synthetic construct
GSSGSS

SEQ ID NO: 14353 - protein, 11 aa, synthetic construct
EAAAKPAPGGS

SEQ ID NO: 14354 - protein, 11 aa, synthetic construct
GGGPAPEAAAK

SEQ ID NO: 14355 - protein, 11 aa, synthetic construct
GSSEAAAKGGG

SEQ ID NO: 14356 - protein, 11 aa, synthetic construct
GGGEAAAKGGS

SEQ ID NO: 14357 - protein, 6 aa, synthetic construct
GSSGSS

SEQ ID NO: 14358 - protein, 15 aa, synthetic construct
EAAAKEAAAKEAAAK

SEQ ID NO: 14359 - protein, 9 aa, synthetic construct
PAPGSSGGS

SEQ ID NO: 14360 - protein, 11 aa, synthetic construct
PAPAPAPAPAP

SEQ ID NO: 14361 - protein, 8 aa, synthetic construct
GSSEAAAK

SEQ ID NO: 14362 - skipped

SEQ ID NO: 14363 - protein, 11 aa, synthetic construct
GGSEAAAKGGG

SEQ ID NO: 14364 - protein, 9 aa, synthetic construct
GGSGGGPAP

SEQ ID NO: 14365 - protein, 6 aa, synthetic construct
GSSGSS

SEQ ID NO: 14366 - protein, 8 aa, synthetic construct
GGSEAAAK

SEQ ID NO: 14367 - protein, 11 aa, synthetic construct
GSSEAAAKGGS

SEQ ID NO: 14368 - protein, 9 aa, synthetic construct
PAPGGGGGS

SEQ ID NO: 14369 - protein, 6 aa, synthetic construct
GSSGGG

SEQ ID NO: 14370 - protein, 6 aa, synthetic construct
GSSGGS

SEQ ID NO: 14371 - protein, 6 aa, synthetic construct
PAPGGG

SEQ ID NO: 14372 - protein, 9 aa, synthetic construct
PAPGSSGGG

SEQ ID NO: 14373 - protein, 8 aa, synthetic construct
GGSEAAAK

SEQ ID NO: 14374 - protein, 11 aa, synthetic construct
GSSPAPEAAAK

SEQ ID NO: 14375 - protein, 9 aa, synthetic construct
GSSGGSPAP

SEQ ID NO: 14376 - protein, 9 aa, synthetic construct
GGSPAPGSS

SEQ ID NO: 14377 - protein, 9 aa, synthetic construct
GGSGGSGGS

SEQ ID NO: 14378 - protein, 9 aa, synthetic construct
GGSGGGPAP

SEQ ID NO: 14379 - protein, 11 aa, synthetic construct
GGGPAPEAAAK

SEQ ID NO: 14380 - protein, 5 aa, synthetic construct
GGGGS

SEQ ID NO: 14381 - protein, 9 aa, synthetic construct
GSSGGSGGG

SEQ ID NO: 14382 - protein, 11 aa, synthetic construct
EAAAKGGGGSS

SEQ ID NO: 14383 - protein, 9 aa, synthetic construct
GGSGSSGGG

SEQ ID NO: 14384 - protein, 9 aa, synthetic construct
GGSGGSGGS

SEQ ID NO: 14385 - protein, 11 aa, synthetic construct
GGGPAPEAAAK

SEQ ID NO: 14386 - protein, 11 aa, synthetic construct
GSSGGGEAAAK

SEQ ID NO: 14387 - skipped

SEQ ID NO: 14388 - protein, 12 aa, synthetic construct
GSAGSAAGSGEF

SEQ ID NO: 14389 - protein, 9 aa, synthetic construct
GSSGGGPAP

SEQ ID NO: 14390 - protein, 6 aa, synthetic construct
GGGGSS

SEQ ID NO: 14391 - protein, 11 aa, synthetic construct
GGGGSSEAAAK

SEQ ID NO: 14392 - protein, 9 aa, synthetic construct
PAPGGSGGG

SEQ ID NO: 14393 - protein, 15 aa, synthetic construct
GSSGSSGSSGSSGSS

SEQ ID NO: 14394 - protein, 9 aa, synthetic construct
GSSGGSPAP

SEQ ID NO: 14395 - protein, 8 aa, synthetic construct
GGSEAAAK

SEQ ID NO: 14396 - protein, 10 aa, synthetic construct
GGGGSGGGGS

SEQ ID NO: 14397 - protein, 11 aa, synthetic construct
GSSEAAAKGGG

SEQ ID NO: 14398 - protein, 11 aa, synthetic construct
EAAAKPAPGGG

SEQ ID NO: 14399 - protein, 11 aa, synthetic construct
EAAAKGGSPAP

SEQ ID NO: 14400 - protein, 11 aa, synthetic construct
GSSEAAAKPAP

SEQ ID NO: 14401 - protein, 9 aa, synthetic construct
GGGPAPGGS

SEQ ID NO: 14402 - skipped

SEQ ID NO: 14403 - protein, 15 aa, synthetic construct
EAAAKGGGGSEAAAK

SEQ ID NO: 14404 - protein, 9 aa, synthetic construct
GGSGSSGGG

SEQ ID NO: 14405 - protein, 12 aa, synthetic construct
GSAGSAAGSGEF

SEQ ID NO: 14406 - protein, 8 aa, synthetic construct
GGGEAAAK

SEQ ID NO: 14407 - protein, 11 aa, synthetic construct
PAPEAAAKGGS

SEQ ID NO: 14408 - protein, 13 aa, synthetic construct
PAPAPAPAPAPAP

SEQ ID NO: 14409 - protein, 9 aa, synthetic construct
GGSGGGGSS

SEQ ID NO: 14410 - protein, 9 aa, synthetic construct
PAPGSSGGS

SEQ ID NO: 14411 - protein, 8 aa, synthetic construct
PAPEAAAK

SEQ ID NO: 14412 - protein, 18 aa, synthetic construct
GSSGSSGSSGSSGSSGSS

SEQ ID NO: 14413 - protein, 9 aa, synthetic construct
GGGGGSGSS

SEQ ID NO: 14414 - protein, 8 aa, synthetic construct
GGGGGGGG

SEQ ID NO: 14415 - protein, 6 aa, synthetic construct
GGGGGG

SEQ ID NO: 14416 - protein, 9 aa, synthetic construct
GSSGGSGGG

SEQ ID NO: 14417 - protein, 6 aa, synthetic construct
GGGGSS

SEQ ID NO: 14418 - protein, 9 aa, synthetic construct
GGSGGGPAP

SEQ ID NO: 14419 - protein, 6 aa, synthetic construct
GSSGSS

SEQ ID NO: 14420 - protein, 25 aa, synthetic construct
EAAAKEAAAKEAAAKEAAAKEAAAK

SEQ ID NO: 14421 - protein, 10 aa, synthetic construct
EAAAKEAAAK

SEQ ID NO: 14422 - protein, 11 aa, synthetic construct
GSSPAPEAAAK

SEQ ID NO: 14423 - protein, 11 aa, synthetic construct
GGSEAAAKPAP

SEQ ID NO: 14424 - protein, 11 aa, synthetic construct
GGSGGGEAAAK

SEQ ID NO: 14425 - protein, 11 aa, synthetic construct
EAAAKGSSPAP

SEQ ID NO: 14426 - protein, 11 aa, synthetic construct
GGSGSSEAAAK

SEQ ID NO: 14427 - skipped

SEQ ID NO: 14428 - protein, 9 aa, synthetic construct
GGGGGSGSS

SEQ ID NO: 14429 - protein, 11 aa, synthetic construct
GGSGGGEAAAK

SEQ ID NO: 14430 - protein, 9 aa, synthetic construct
GSSGGSGGG

SEQ ID NO: 14431 - protein, 11 aa, synthetic construct
EAAAKPAPGGG

SEQ ID NO: 14432 - protein, 9 aa, synthetic construct
PAPGGSGGG

SEQ ID NO: 14433 - protein, 7 aa, synthetic construct
PAPAPAP

SEQ ID NO: 14434 - protein, 11 aa, synthetic construct
GSSEAAAKPAP

SEQ ID NO: 14435 - protein, 33 aa, synthetic construct; identical to SEQ ID NO: 5006

SEQ ID NO: 14436 - protein, 9 aa, synthetic construct
GSSGGSGGG

SEQ ID NO: 14437 - protein, 18 aa, synthetic construct
GSSGSSGSSGSSGSSGSS

SEQ ID NO: 14438 - protein, 9 aa, synthetic construct
GSSGGGPAP

SEQ ID NO: 14439 - protein, 13 aa, synthetic construct
PAPAPAPAPAPAP

SEQ ID NO: 14440 - protein, 9 aa, synthetic construct
GGGGGSPAP

SEQ ID NO: 14441 - protein, 6 aa, synthetic construct
PAPGSS

SEQ ID NO: 14442 - protein, 11 aa, synthetic construct
PAPEAAAKGGS

SEQ ID NO: 14443 - protein, 9 aa, synthetic construct
GGGGSSPAP

SEQ ID NO: 14444 - protein, 8 aa, synthetic construct
GGSEAAAK

SEQ ID NO: 14445 - protein, 11 aa, synthetic construct
EAAAKPAPGGS

SEQ ID NO: 14446 - protein, 6 aa, synthetic construct
PAPGSS

SEQ ID NO: 14447 - protein, 9 aa, synthetic construct
PAPGSSGGG

SEQ ID NO: 14448 - protein, 15 aa, synthetic construct
EAAAKEAAAKEAAAK

SEQ ID NO: 14449 - skipped

SEQ ID NO: 14450 - protein, 5 aa, synthetic construct
GGGGS

SEQ ID NO: 14451 - protein, 9 aa, synthetic construct
GGSGGGGSS

SEQ ID NO: 14452 - protein, 6 aa, synthetic construct
GGSGGG

SEQ ID NO: 14453 - protein, 11 aa, synthetic construct
GGGEAAAKPAP

SEQ ID NO: 14454 - protein, 25 aa, synthetic construct
EAAAKEAAAKEAAAKEAAAKEAAAK

SEQ ID NO: 14455 - protein, 9 aa, synthetic construct
PAPGGSGGG

SEQ ID NO: 14456 - protein, 18 aa, synthetic construct
GSSGSSGSSGSSGSSGSS

SEQ ID NO: 14457 - protein, 11 aa, synthetic construct
GGGEAAAKPAP

SEQ ID NO: 14458 - protein, 9 aa, synthetic construct
GSSGGSPAP

SEQ ID NO: 14459 - protein, 11 aa, synthetic construct
PAPAPAPAPAP

SEQ ID NO: 14460 - protein, 11 aa, synthetic construct
GSSGGSEAAAK

SEQ ID NO: 14461 - protein, 9 aa, synthetic construct
GGSPAPGSS

SEQ ID NO: 14462 - protein, 9 aa, synthetic construct
GGSGGSGGS

SEQ ID NO: 14463 - protein, 11 aa, synthetic construct
PAPEAAAKGSS

SEQ ID NO: 14464 - protein, 8 aa, synthetic construct
EAAAKGGS

SEQ ID NO: 14465 - protein, 15 aa, synthetic construct
EAAAKGGGGSEAAAK

SEQ ID NO: 14466 - protein, 9 aa, synthetic construct
GGGGSSPAP

SEQ ID NO: 14467 - protein, 5 aa, synthetic construct
EAAAK

SEQ ID NO: 14468 - protein, 11 aa, synthetic construct
EAAAKGGGGSS

SEQ ID NO: 14469 - protein, 11 aa, synthetic construct
GGGGGSEAAAK

SEQ ID NO: 14470 - protein, 4 aa, synthetic construct
GGGG

SEQ ID NO: 14471 - protein, 11 aa, synthetic construct
GGGGGSEAAAK

SEQ ID NO: 14472 - protein, 11 aa, synthetic construct
EAAAKGGGPAP

SEQ ID NO: 14473 - protein, 20 aa, synthetic construct
GGGGSGGGGSGGGGSGGGGS

SEQ ID NO: 14474 - protein, 9 aa, synthetic construct
GSSGGSGGG

SEQ ID NO: 14475 - protein, 15 aa, synthetic construct
GGGGSGGGGSGGGGS

SEQ ID NO: 14476 - protein, 11 aa, synthetic construct
GGSGGGEAAAK

SEQ ID NO: 14477 - protein, 11 aa, synthetic construct
PAPEAAAKGGG

SEQ ID NO: 14478 - protein, 10 aa, synthetic construct
GGGGSGGGGS

SEQ ID NO: 14479 - protein, 11 aa, synthetic construct
GSSGGGEAAAK

SEQ ID NO: 14480 - protein, 5 aa, synthetic construct
GGGGG

SEQ ID NO: 14481 - protein, 6 aa, synthetic construct
GGSGSS

SEQ ID NO: 14482 - protein, 13 aa, synthetic construct
PAPAPAPAPAPAP

SEQ ID NO: 14483 - protein, 11 aa, synthetic construct
GGSEAAAKPAP

SEQ ID NO: 14484 - protein, 6 aa, synthetic construct
GGGGGG

SEQ ID NO: 14485 - protein, 11 aa, synthetic construct
GSSGGGEAAAK

SEQ ID NO: 14486 - protein, 33 aa, synthetic construct; identical to SEQ ID NO: 5006

SEQ ID NO: 14487 - protein, 9 aa, synthetic construct
GGSPAPGSS

SEQ ID NO: 14488 - protein, 9 aa, synthetic construct
GGGGSSPAP

SEQ ID NO: 14489 - protein, 15 aa, synthetic construct
GGGGSEAAAKGGGGS

SEQ ID NO: 14490 - protein, 8 aa, synthetic construct
GGGGGGGG

SEQ ID NO: 14491 - protein, 5 aa, synthetic construct
PAPAP

SEQ ID NO: 14492 - protein, 8 aa, synthetic construct
GGGEAAAK

SEQ ID NO: 14493 - protein, 9 aa, synthetic construct
GSSPAPGGG

SEQ ID NO: 14494 - protein, 15 aa, synthetic construct
GGSGGSGGSGGSGGS

SEQ ID NO: 14495 - protein, 6 aa, synthetic construct
GGGGGS

SEQ ID NO: 14496 - protein, 9 aa, synthetic construct
PAPGGGGSS

SEQ ID NO: 14497 - protein, 8 aa, synthetic construct
GGGEAAAK

SEQ ID NO: 14498 - protein, 11 aa, synthetic construct
PAPEAAAKGGG

SEQ ID NO: 14499 - protein, 8 aa, synthetic construct
GSSEAAAK

SEQ ID NO: 14500 - protein, 10 aa, synthetic construct
EAAAKEAAAK

SEQ ID NO: 14501 - protein, 11 aa, synthetic construct
EAAAKGGGGGS

SEQ ID NO: 14502 - protein, 11 aa, synthetic construct
GGGEAAAKGGS

SEQ ID NO: 14503 - protein, 11 aa, synthetic construct
PAPAPAPAPAP

SEQ ID NO: 14504 - protein, 11 aa, synthetic construct
PAPGSSEAAAK

SEQ ID NO: 14505 - protein, 15 aa, synthetic construct
EAAAKEAAAKEAAAK

SEQ ID NO: 14506 - protein, 9 aa, synthetic construct
GGSPAPGSS

SEQ ID NO: 14507 - protein, 9 aa, synthetic construct
PAPGSSGGS

SEQ ID NO: 14508 - protein, 20 aa, synthetic construct
EAAAKEAAAKEAAAKEAAAK

SEQ ID NO: 14509 - protein, 8 aa, synthetic construct
EAAAKGGG

SEQ ID NO: 14510 - protein, 11 aa, synthetic construct
EAAAKGGSGGG

SEQ ID NO: 14511 - protein, 6 aa, synthetic construct
GGGGGS

SEQ ID NO: 14512 - protein, 9 aa, synthetic construct
PAPGGSGGG

SEQ ID NO: 14513 - protein, 9 aa, synthetic construct
GGGPAPGGS

SEQ ID NO: 14514 - skipped

SEQ ID NO: 14515 - protein, 9 aa, synthetic construct
GGSGGSGGS

SEQ ID NO: 14516 - protein, 5 aa, synthetic construct
GGGGS

SEQ ID NO: 14517 - protein, 4 aa, synthetic construct
GGGG

SEQ ID NO: 14518 - protein, 11 aa, synthetic construct
GGSEAAAKPAP

SEQ ID NO: 14519 - protein, 9 aa, synthetic construct
PAPAPAPAP

SEQ ID NO: 14520 - skipped

SEQ ID NO: 14521 - protein, 15 aa, synthetic construct
EAAAKEAAAKEAAAK

SEQ ID NO: 14522 - protein, 8 aa, synthetic construct
EAAAKGSS

SEQ ID NO: 14523 - protein, 8 aa, synthetic construct
EAAAKGGG

SEQ ID NO: 14524 - protein, 11 aa, synthetic construct
PAPEAAAKGGG

SEQ ID NO: 14525 - protein, 11 aa, synthetic construct
GSSGGGEAAAK

SEQ ID NO: 14526 - protein, 11 aa, synthetic construct
PAPGGGEAAAK

SEQ ID NO: 14527 - protein, 20 aa, synthetic construct
GGGGSGGGGSGGGGSGGGGS

SEQ ID NO: 14528 - protein, 6 aa, synthetic construct
GSSGGG

SEQ ID NO: 14529 - protein, 20 aa, synthetic construct
GGGGSGGGGSGGGGSGGGGS

SEQ ID NO: 14530 - protein, 6 aa, synthetic construct
GGSGSS

SEQ ID NO: 14531 - protein, 11 aa, synthetic construct
GGSGSSEAAAK

SEQ ID NO: 14532 - protein, 7 aa, synthetic construct
PAPAPAP

SEQ ID NO: 14533 - protein, 9 aa, synthetic construct
GSSGGSPAP

SEQ ID NO: 14534 - protein, 6 aa, synthetic construct
GGSPAP

SEQ ID NO: 14535 - protein, 9 aa, synthetic construct
GGSGGGPAP

SEQ ID NO: 14536 - protein, 8 aa, synthetic construct
GSSEAAAK

SEQ ID NO: 14537 - protein, 9 aa, synthetic construct
GSSGGGPAP

SEQ ID NO: 14538 - protein, 11 aa, synthetic construct
GGGGSSEAAAK

SEQ ID NO: 14539 - protein, 11 aa, synthetic construct
GGSEAAAKPAP

SEQ ID NO: 14540 - protein, 9 aa, synthetic construct
GGSGGGPAP

SEQ ID NO: 14541 - protein, 20 aa, synthetic construct
GGGGSGGGGSGGGGSGGGGS

SEQ ID NO: 14542 - protein, 9 aa, synthetic construct
GGGGSSPAP

SEQ ID NO: 14543 - protein, 8 aa, synthetic construct
EAAAKGGS

SEQ ID NO: 14544 - protein, 11 aa, synthetic construct
GGSEAAAKGSS

SEQ ID NO: 14545 - protein, 11 aa, synthetic construct
GGGGSSEAAAK

SEQ ID NO: 14546 - protein, 11 aa, synthetic construct
EAAAKGGSGGG

SEQ ID NO: 14547 - protein, 6 aa, synthetic construct
GGSGGS

SEQ ID NO: 14548 - protein, 8 aa, synthetic construct
EAAAKGGG

SEQ ID NO: 14549 - protein, 15 aa, synthetic construct
GSSGSSGSSGSSGSS

SEQ ID NO: 14550 - protein, 9 aa, synthetic construct
GSSGGGPAP

SEQ ID NO: 14551 - protein, 11 aa, synthetic construct
PAPGGSEAAAK

SEQ ID NO: 14552 - protein, 6 aa, synthetic construct
GGSPAP

SEQ ID NO: 14553 - protein, 11 aa, synthetic construct
EAAAKPAPGSS

SEQ ID NO: 14554 - protein, 16 aa, synthetic construct
SGSETPGTSESATPES

SEQ ID NO: 14555 - protein, 6 aa, synthetic construct
GSSPAP

SEQ ID NO: 14556 - protein, 9 aa, synthetic construct
GSSPAPGGG

SEQ ID NO: 14557 - protein, 11 aa, synthetic construct
GGGEAAAKGSS

SEQ ID NO: 14558 - protein, 9 aa, synthetic construct
GGGPAPGGS

SEQ ID NO: 14559 - protein, 8 aa, synthetic construct
EAAAKGGG

SEQ ID NO: 14560 - protein, 6 aa, synthetic construct
GSSGGG

SEQ ID NO: 14561 - protein, 11 aa, synthetic construct
GGSPAPEAAAK

SEQ ID NO: 14562 - protein, 11 aa, synthetic construct
EAAAKGSSPAP

SEQ ID NO: 14563 - protein, 15 aa, synthetic construct
EAAAKGGGGSEAAAK

SEQ ID NO: 14564 - protein, 15 aa, synthetic construct
GSSGSSGSSGSSGSS

SEQ ID NO: 14565 - protein, 11 aa, synthetic construct
EAAAKGGSPAP

SEQ ID NO: 14566 - protein, 6 aa, synthetic construct
GGSGGS

SEQ ID NO: 14567 - protein, 11 aa, synthetic construct
EAAAKGSSGGS

SEQ ID NO: 14568 - protein, 9 aa, synthetic construct
GSSGGGPAP

SEQ ID NO: 14569 - protein, 11 aa, synthetic construct
PAPEAAAKGGS

SEQ ID NO: 14570 - protein, 11 aa, synthetic construct
EAAAKPAPGGG

SEQ ID NO: 14571 - protein, 6 aa, synthetic construct
GGSPAP

SEQ ID NO: 14572 - protein, 10 aa, synthetic construct
GGGGSGGGGS

SEQ ID NO: 14573 - protein, 6 aa, synthetic construct
GGGGSS

SEQ ID NO: 14574 - protein, 9 aa, synthetic construct
GGSPAPGGG

SEQ ID NO: 14575 - protein, 11 aa, synthetic construct
EAAAKPAPGSS

SEQ ID NO: 14576 - protein, 8 aa, synthetic construct
EAAAKPAP

SEQ ID NO: 14577 - protein, 11 aa, synthetic construct
PAPEAAAKGSS

SEQ ID NO: 14578 - protein, 11 aa, synthetic construct
EAAAKGGSGSS

SEQ ID NO: 14579 - protein, 11 aa, synthetic construct
GGGEAAAKGSS

SEQ ID NO: 14580 - protein, 15 aa, synthetic construct
GGGGSEAAAKGGGGS

SEQ ID NO: 14581 - protein, 9 aa, synthetic construct
PAPGGSGSS

SEQ ID NO: 14582 - protein, 11 aa, synthetic construct
GGSEAAAKPAP

SEQ ID NO: 14583 - protein, 15 aa, synthetic construct
GGSGGSGGSGGSGGS

SEQ ID NO: 14584 - protein, 11 aa, synthetic construct
GSSGGSEAAAK

SEQ ID NO: 14585 - skipped

SEQ ID NO: 14586 - protein, 11 aa, synthetic construct
PAPGGSEAAAK

SEQ ID NO: 14587 - protein, 11 aa, synthetic construct
PAPEAAAKGGS

SEQ ID NO: 14588 - protein, 9 aa, synthetic construct
GGSGSSPAP

SEQ ID NO: 14589 - protein, 6 aa, synthetic construct
GSSPAP

SEQ ID NO: 14590 - protein, 8 aa, synthetic construct
GGGEAAAK

SEQ ID NO: 14591 - protein, 6 aa, synthetic construct
GGGGSS

SEQ ID NO: 14592 - protein, 9 aa, synthetic construct
GGSPAPGSS

SEQ ID NO: 14593 - protein, 6 aa, synthetic construct
PAPGGS

SEQ ID NO: 14594 - protein, 11 aa, synthetic construct
EAAAKGSSPAP

SEQ ID NO: 14595 - protein, 9 aa, synthetic construct
GGGGSSGGS

SEQ ID NO: 14596 - protein, 13 aa, synthetic construct
PAPAPAPAPAPAP

SEQ ID NO: 14597 - protein, 11 aa, synthetic construct
GGSEAAAKGGG

SEQ ID NO: 14598 - protein, 6 aa, synthetic construct
GGSGGS

SEQ ID NO: 14599 - protein, 9 aa, synthetic construct
GSSGGGGGS

SEQ ID NO: 14600 - protein, 11 aa, synthetic construct
EAAAKGGGPAP

SEQ ID NO: 14601 - protein, 20 aa, synthetic construct
EAAAKEAAAKEAAAKEAAAK

SEQ ID NO: 14602 - protein, 9 aa, synthetic construct
GGGPAPGSS

SEQ ID NO: 14603 - protein, 20 aa, synthetic construct
GGGGSGGGGSGGGGSGGGGS

SEQ ID NO: 14604 - protein, 20 aa, synthetic construct
EAAAKEAAAKEAAAKEAAAK

SEQ ID NO: 14605 - protein, 9 aa, synthetic construct
PAPGSSGGS

SEQ ID NO: 14606 - protein, 11 aa, synthetic construct
PAPGSSEAAAK

SEQ ID NO: 14607 - protein, 11 aa, synthetic construct
GSSPAPEAAAK

SEQ ID NO: 14608 - protein, 15 aa, synthetic construct
EAAAKGGGGSEAAAK

SEQ ID NO: 14609 - protein, 6 aa, synthetic construct
GGSPAP

SEQ ID NO: 14610 - protein, 11 aa, synthetic construct
GGSGSSEAAAK

SEQ ID NO: 14611 - protein, 11 aa, synthetic construct
GGSEAAAKGGG

SEQ ID NO: 14612 - protein, 9 aa, synthetic construct
PAPGGGGSS

SEQ ID NO: 14613 - protein, 12 aa, synthetic construct
GGSGGSGGSGGS

SEQ ID NO: 14614 - protein, 9 aa, synthetic construct
GGGGSSGGS

SEQ ID NO: 14615 - protein, 33 aa, synthetic construct; identical to SEQ ID NO: 5006

SEQ ID NO: 14616 - protein, 6 aa, synthetic construct
GGGPAP

SEQ ID NO: 14617 - protein, 20 aa, synthetic construct
GGGGSGGGGSGGGGSGGGGS

SEQ ID NO: 14618 - protein, 8 aa, synthetic construct
GSSEAAAK

SEQ ID NO: 14619 - protein, 11 aa, synthetic construct
GGSPAPEAAAK

SEQ ID NO: 14620 - protein, 11 aa, synthetic construct
GGGGGSEAAAK

SEQ ID NO: 14621 - protein, 9 aa, synthetic construct
GSSPAPGGS

SEQ ID NO: 14622 - skipped

SEQ ID NO: 14623 - protein, 8 aa, synthetic construct
EAAAKPAP

SEQ ID NO: 14624 - protein, 8 aa, synthetic construct
EAAAKGGG

SEQ ID NO: 14625 - protein, 8 aa, synthetic construct
GGGEAAAK

SEQ ID NO: 14626 - protein, 9 aa, synthetic construct
PAPGSSGGG

SEQ ID NO: 14627 - protein, 11 aa, synthetic construct
EAAAKGGSPAP

SEQ ID NO: 14628 - protein, 9 aa, synthetic construct
GSSGGSGGG

SEQ ID NO: 14629 - protein, 11 aa, synthetic construct
GSSGGGEAAAK

SEQ ID NO: 14630 - protein, 9 aa, synthetic construct
GGGPAPGSS

SEQ ID NO: 14631 - protein, 11 aa, synthetic construct
PAPGGGEAAAK

SEQ ID NO: 14632 - protein, 12 aa, synthetic construct
GSSGSSGSSGSS

SEQ ID NO: 14633 - protein, 8 aa, synthetic construct
GGSEAAAK

SEQ ID NO: 14634 - protein, 11 aa, synthetic construct
GGGEAAAKPAP

SEQ ID NO: 14635 - protein, 11 aa, synthetic construct
EAAAKGGGPAP

SEQ ID NO: 14636 - protein, 9 aa, synthetic construct
GGGGSSPAP

SEQ ID NO: 14637 - protein, 11 aa, synthetic construct
EAAAKPAPGSS

SEQ ID NO: 14638 - protein, 9 aa, synthetic construct
GGGGSSPAP

SEQ ID NO: 14639 - protein, 6 aa, synthetic construct
GSSGSS

SEQ ID NO: 14640 - protein, 25 aa, synthetic construct
GGGGSGGGGSGGGGSGGGGSGGGGS

SEQ ID NO: 14641 - protein, 9 aa, synthetic construct
GGGGSSGGS

SEQ ID NO: 14642 - protein, 11 aa, synthetic construct
EAAAKGGSGSS

SEQ ID NO: 14643 - protein, 8 aa, synthetic construct
EAAAKPAP

SEQ ID NO: 14644 - protein, 11 aa, synthetic construct
GSSGGGEAAAK

SEQ ID NO: 14645 - protein, 9 aa, synthetic construct
PAPGGSGGG

SEQ ID NO: 14646 - protein, 11 aa, synthetic construct
EAAAKGGGPAP

SEQ ID NO: 14647 - protein, 9 aa, synthetic construct
GSSGSSGSS

SEQ ID NO: 14648 - protein, 6 aa, synthetic construct
GSSGGS

SEQ ID NO: 14649 - protein, 11 aa, synthetic construct
GGSEAAAKGGG

SEQ ID NO: 14650 - protein, 8 aa, synthetic construct
EAAAKGGS

SEQ ID NO: 14651 - protein, 9 aa, synthetic construct
GGSGSSGGG

SEQ ID NO: 14652 - protein, 5 aa, synthetic construct
EAAAK

SEQ ID NO: 14653 - protein, 9 aa, synthetic construct
GSSGGSPAP

SEQ ID NO: 14654 - protein, 9 aa, synthetic construct
GGGGSSGGS

SEQ ID NO: 14655 - protein, 9 aa, synthetic construct
PAPGGSGGG

SEQ ID NO: 14656 - protein, 9 aa, synthetic construct
GGGPAPGGS

SEQ ID NO: 14657 - protein, 11 aa, synthetic construct
GSSPAPEAAAK

SEQ ID NO: 14658 - protein, 9 aa, synthetic construct
GGSGSSPAP

SEQ ID NO: 14659 - protein, 11 aa, synthetic construct
GSSEAAAKGGS

SEQ ID NO: 14660 - protein, 6 aa, synthetic construct
PAPGGG

SEQ ID NO: 14661 - protein, 16 aa, synthetic construct
SGSETPGTSESATPES

SEQ ID NO: 14662 - protein, 5 aa, synthetic construct
GGGGS

SEQ ID NO: 14663 - protein, 11 aa, synthetic construct
GSSGGGEAAAK

SEQ ID NO: 14664 - protein, 15 aa, synthetic construct
EAAAKGGGGSEAAAK

SEQ ID NO: 14665 - protein, 11 aa, synthetic construct
GSSEAAAKPAP

SEQ ID NO: 14666 - protein, 6 aa, synthetic construct
GGGGGG

SEQ ID NO: 14667 - protein, 15 aa, synthetic construct
EAAAKEAAAKEAAAK

SEQ ID NO: 14668 - protein, 11 aa, synthetic construct
EAAAKPAPGSS

SEQ ID NO: 14669 - protein, 11 aa, synthetic construct
GGSGSSEAAAK

SEQ ID NO: 14670 - protein, 8 aa, synthetic construct
GGSEAAAK

SEQ ID NO: 14671 - protein, 11 aa, synthetic construct
GGSPAPEAAAK

SEQ ID NO: 14672 - protein, 9 aa, synthetic construct
GGGPAPGSS

SEQ ID NO: 14673 - protein, 11 aa, synthetic construct
GGGGGSEAAAK

SEQ ID NO: 14674 - protein, 11 aa, synthetic construct
EAAAKPAPGSS

SEQ ID NO: 14675 - protein, 12 aa, synthetic construct
GSSGSSGSSGSS

SEQ ID NO: 14676 - protein, 8 aa, synthetic construct
EAAAKPAP

SEQ ID NO: 14677 - protein, 8 aa, synthetic construct
GGGEAAAK

SEQ ID NO: 14678 - protein, 6 aa, synthetic construct
GGSGGS

SEQ ID NO: 14679 - protein, 11 aa, synthetic construct
EAAAKGSSGGS

SEQ ID NO: 14680 - protein, 16 aa, synthetic construct
SGSETPGTSESATPES

SEQ ID NO: 14681 - protein, 11 aa, synthetic construct
EAAAKGSSGGG

SEQ ID NO: 14682 - protein, 30 aa, synthetic construct; identical to SEQ ID NO: 5130

SEQ ID NO: 14683 - protein, 9 aa, synthetic construct
GGSGGGPAP

SEQ ID NO: 14684 - protein, 9 aa, synthetic construct
PAPAPAPAP

SEQ ID NO: 14685 - protein, 11 aa, synthetic construct
GGGEAAAKGGS

SEQ ID NO: 14686 - protein, 9 aa, synthetic construct
GSSGGSGGG

SEQ ID NO: 14687 - protein, 11 aa, synthetic construct
PAPEAAAKGGS

SEQ ID NO: 14688 - protein, 11 aa, synthetic construct
GGGEAAAKGSS

SEQ ID NO: 14689 - protein, 20 aa, synthetic construct
GGGGSGGGGSGGGGSGGGGS

SEQ ID NO: 14690 - protein, 9 aa, synthetic construct
PAPGSSGGG

SEQ ID NO: 14691 - protein, 9 aa, synthetic construct
GGSGSSGGG

SEQ ID NO: 14692 - protein, 11 aa, synthetic construct
EAAAKPAPGSS

SEQ ID NO: 14693 - protein, 11 aa, synthetic construct
GSSEAAAKGGG

SEQ ID NO: 14694 - protein, 15 aa, synthetic construct
GGSGGSGGSGGSGGS

SEQ ID NO: 14695 - protein, 11 aa, synthetic construct
GGSEAAAKPAP

SEQ ID NO: 14696 - protein, 11 aa, synthetic construct
EAAAKGGSPAP

SEQ ID NO: 14697 - protein, 11 aa, synthetic construct
EAAAKGGGGGS

SEQ ID NO: 14698 - protein, 11 aa, synthetic construct
GSSPAPEAAAK

SEQ ID NO: 14699 - protein, 5 aa, synthetic construct
PAPAP

SEQ ID NO: 14700 - protein, 11 aa, synthetic construct
PAPGGSEAAAK

SEQ ID NO: 14701 - protein, 6 aa, synthetic construct
GGSGSS

SEQ ID NO: 14702 - protein, 11 aa, synthetic construct
GGSEAAAKPAP

SEQ ID NO: 14703 - skipped

SEQ ID NO: 14704 - protein, 33 aa, synthetic construct; identical to SEQ ID NO: 5006

SEQ ID NO: 14705 - protein, 11 aa, synthetic construct
PAPGGGEAAAK

SEQ ID NO: 14706 - protein, 9 aa, synthetic construct
PAPGGGGGS

SEQ ID NO: 14707 - protein, 9 aa, synthetic construct
PAPGGSGSS

SEQ ID NO: 14708 - protein, 11 aa, synthetic construct
GSSGGGEAAAK

SEQ ID NO: 14709 - protein, 11 aa, synthetic construct
GGSEAAAKPAP

SEQ ID NO: 14710 - protein, 5 aa, synthetic construct
GGGGG

SEQ ID NO: 14711 - protein, 11 aa, synthetic construct
GGGEAAAKGSS

SEQ ID NO: 14712 - protein, 15 aa, synthetic construct
GSSGSSGSSGSSGSS

SEQ ID NO: 14713 - protein, 16 aa, synthetic construct
SGSETPGTSESATPES

SEQ ID NO: 14714 - protein, 9 aa, synthetic construct
PAPGSSGGG

SEQ ID NO: 14715 - protein, 9 aa, synthetic construct
GGGGSSPAP

SEQ ID NO: 14716 - protein, 8 aa, synthetic construct
GGGEAAAK

SEQ ID NO: 14717 - protein, 6 aa, synthetic construct
GGSGGG

SEQ ID NO: 14718 - protein, 11 aa, synthetic construct
EAAAKGSSGGG

SEQ ID NO: 14719 - protein, 11 aa, synthetic construct
GSSPAPEAAAK

SEQ ID NO: 14720 - protein, 9 aa, synthetic construct
GGGPAPGSS

SEQ ID NO: 14721 - protein, 11 aa, synthetic construct
EAAAKGSSGGG

SEQ ID NO: 14722 - protein, 11 aa, synthetic construct
GGGGGSEAAAK

SEQ ID NO: 14723 - protein, 11 aa, synthetic construct
EAAAKPAPGGS

SEQ ID NO: 14724 - protein, 11 aa, synthetic construct
EAAAKGSSPAP

SEQ ID NO: 14725 - protein, 7 aa, synthetic construct
GGGGGGG

SEQ ID NO: 14726 - protein, 15 aa, synthetic construct
EAAAKEAAAKEAAAK

SEQ ID NO: 14727 - protein, 9 aa, synthetic construct
GSSPAPGGS

SEQ ID NO: 14728 - protein, 11 aa, synthetic construct
GGGGSSEAAAK

SEQ ID NO: 14729 - protein, 11 aa, synthetic construct
GGSEAAAKGSS

SEQ ID NO: 14730 - protein, 11 aa, synthetic construct
GGSEAAAKGSS

SEQ ID NO: 14731 - protein, 11 aa, synthetic construct
EAAAKPAPGGG

SEQ ID NO: 14732 - protein, 18 aa, synthetic construct
GSSGSSGSSGSSGSSGSS

SEQ ID NO: 14733 - protein, 15 aa, synthetic construct
GGGGSEAAAKGGGGS

SEQ ID NO: 14734 - protein, 9 aa, synthetic construct
GSSPAPGGS

SEQ ID NO: 14735 - protein, 10 aa, synthetic construct
GGGGSGGGGS

SEQ ID NO: 14736 - protein, 9 aa, synthetic construct
GSSGGSPAP

SEQ ID NO: 14737 - protein, 6 aa, synthetic construct
GGSGGS

SEQ ID NO: 14738 - protein, 11 aa, synthetic construct
PAPGSSEAAAK

SEQ ID NO: 14739 - protein, 9 aa, synthetic construct
PAPGGGGSS

SEQ ID NO: 14740 - protein, 9 aa, synthetic construct
GGGGSSGGS

SEQ ID NO: 14741 - protein, 10 aa, synthetic construct
GGGGSGGGGS

SEQ ID NO: 14742 - protein, 20 aa, synthetic construct
GGGGSGGGGSGGGGSGGGGS

SEQ ID NO: 14743 - protein, 11 aa, synthetic construct
GGSGSSEAAAK

SEQ ID NO: 14744 - protein, 9 aa, synthetic construct
GGSGGGGSS

SEQ ID NO: 14745 - protein, 11 aa, synthetic construct
GGSEAAAKPAP

SEQ ID NO: 14746 - protein, 11 aa, synthetic construct
EAAAKGGSPAP

SEQ ID NO: 14747 - protein, 9 aa, synthetic construct
PAPAPAPAP

SEQ ID NO: 14748 - protein, 9 aa, synthetic construct
GSSGGSPAP

SEQ ID NO: 14749 - protein, 9 aa, synthetic construct
GGGGGSPAP

SEQ ID NO: 14750 - protein, 11 aa, synthetic construct
EAAAKGGGPAP

SEQ ID NO: 14751 - protein, 9 aa, synthetic construct
GSSGGSPAP

SEQ ID NO: 14752 - protein, 5 aa, synthetic construct
GGGGG

SEQ ID NO: 14753 - protein, 6 aa, synthetic construct
GGGGGS

SEQ ID NO: 14754 - protein, 15 aa, synthetic construct
EAAAKEAAAKEAAAK

SEQ ID NO: 14755 - protein, 6 aa, synthetic construct
PAPGGG

SEQ ID NO: 14756 - protein, 11 aa, synthetic construct
GSSGGSEAAAK

SEQ ID NO: 14757 - protein, 9 aa, synthetic construct
GGSPAPGGG

SEQ ID NO: 14758 - protein, 18 aa, synthetic construct
GSSGSSGSSGSSGSSGSS

SEQ ID NO: 14759 - protein, 11 aa, synthetic construct
GGSPAPEAAAK

SEQ ID NO: 14760 - protein, 9 aa, synthetic construct
PAPGGGGSS

SEQ ID NO: 14761 - protein, 11 aa, synthetic construct
GGGGSSEAAAK

SEQ ID NO: 14762 - protein, 6 aa, synthetic construct
PAPGGS

SEQ ID NO: 14763 - protein, 15 aa, synthetic construct
GGSGGSGGSGGSGGS

SEQ ID NO: 14764 - protein, 12 aa, synthetic construct
GSAGSAAGSGEF

SEQ ID NO: 14765 - protein, 6 aa, synthetic construct
GSSGGS

SEQ ID NO: 14766 - protein, 9 aa, synthetic construct
GGSGGGGSS

SEQ ID NO: 14767 - protein, 9 aa, synthetic construct
GGSGGGGSS

SEQ ID NO: 14768 - protein, 11 aa, synthetic construct
PAPEAAAKGSS

SEQ ID NO: 14769 - protein, 12 aa, synthetic construct
GSSGSSGSSGSS

SEQ ID NO: 14770 - protein, 13 aa, synthetic construct
PAPAPAPAPAPAP

SEQ ID NO: 14771 - protein, 9 aa, synthetic construct
PAPGSSGGG

SEQ ID NO: 14772 - protein, 9 aa, synthetic construct
GGSGSSPAP

SEQ ID NO: 14773 - protein, 9 aa, synthetic construct
GGSGGGPAP

SEQ ID NO: 14774 - protein, 9 aa, synthetic construct
PAPGGGGGS

SEQ ID NO: 14775 - protein, 11 aa, synthetic construct
EAAAKGSSPAP

SEQ ID NO: 14776 - protein, 9 aa, synthetic construct
GGSGSSPAP

SEQ ID NO: 14777 - protein, 8 aa, synthetic construct
EAAAKGSS

SEQ ID NO: 14778 - protein, 11 aa, synthetic construct
GGGGGSEAAAK

SEQ ID NO: 14779 - protein, 8 aa, synthetic construct
GGGGGGGG

SEQ ID NO: 14780 - protein, 10 aa, synthetic construct
EAAAKEAAAK

SEQ ID NO: 14781 - protein, 11 aa, synthetic construct
GGGEAAAKGGS

SEQ ID NO: 14782 - protein, 11 aa, synthetic construct
EAAAKGGSPAP

SEQ ID NO: 14783 - protein, 8 aa, synthetic construct
GSSEAAAK

SEQ ID NO: 14784 - protein, 11 aa, synthetic construct
PAPGGGEAAAK

SEQ ID NO: 14785 - protein, 6 aa, synthetic construct
GGSPAP

SEQ ID NO: 14786 - protein, 9 aa, synthetic construct
GSSPAPGGG

SEQ ID NO: 14787 - protein, 9 aa, synthetic construct
GGSGSSPAP

SEQ ID NO: 14788 - skipped

SEQ ID NO: 14789 - protein, 9 aa, synthetic construct
GGSGGGGSS

SEQ ID NO: 14790 - protein, 20 aa, synthetic construct
GGGGSGGGGSGGGGSGGGGS

SEQ ID NO: 14791 - protein, 11 aa, synthetic construct
EAAAKGGGPAP

SEQ ID NO: 14792 - protein, 11 aa, synthetic construct
GSSGGGEAAAK

SEQ ID NO: 14793 - protein, 33 aa, synthetic construct; identical to SEQ ID NO: 5006

SEQ ID NO: 14794 - protein, 46 aa, synthetic construct; identical to SEQ ID NO: 5217

SEQ ID NO: 14795 - protein, 10 aa, synthetic construct
EAAAKEAAAK

SEQ ID NO: 14796 - protein, 11 aa, synthetic construct
GSSPAPEAAAK

SEQ ID NO: 14797 - protein, 11 aa, synthetic construct
EAAAKPAPGGS

SEQ ID NO: 14798 - protein, 9 aa, synthetic construct
GSSGGSPAP

SEQ ID NO: 14799 - protein, 11 aa, synthetic construct
GGGPAPEAAAK

SEQ ID NO: 14800 - protein, 11 aa, synthetic construct
GGGEAAAKPAP

SEQ ID NO: 14801 - protein, 11 aa, synthetic construct
GGGGGSEAAAK

SEQ ID NO: 14802 - protein, 9 aa, synthetic construct
GGGPAPGSS

SEQ ID NO: 14803 - protein, 11 aa, synthetic construct
GGSEAAAKPAP

SEQ ID NO: 14804 - protein, 18 aa, synthetic construct
GSSGSSGSSGSSGSSGSS

SEQ ID NO: 14805 - protein, 11 aa, synthetic construct
EAAAKGSSGGS

SEQ ID NO: 14806 - protein, 6 aa, synthetic construct
GGGGGG

SEQ ID NO: 14807 - protein, 9 aa, synthetic construct
GSSPAPGGS

SEQ ID NO: 14808 - protein, 9 aa, synthetic construct
GGSGSSPAP

SEQ ID NO: 14809 - protein, 11 aa, synthetic construct
GGGPAPEAAAK

SEQ ID NO: 14810 - protein, 11 aa, synthetic construct
GGSGGGEAAAK

SEQ ID NO: 14811 - protein, 12 aa, synthetic construct
GSAGSAAGSGEF

SEQ ID NO: 14812 - protein, 11 aa, synthetic construct
GSSGGGEAAAK

SEQ ID NO: 14813 - skipped

SEQ ID NO: 14814 - protein, 9 aa, synthetic construct
PAPGSSGGS

SEQ ID NO: 14815 - protein, 9 aa, synthetic construct
GGGGSSPAP

SEQ ID NO: 14816 - protein, 33 aa, synthetic construct; identical to SEQ ID NO: 5006

SEQ ID NO: 14817 - protein, 7 aa, synthetic construct
GGGGGGG

SEQ ID NO: 14818 - protein, 11 aa, synthetic construct
PAPAPAPAPAP

SEQ ID NO: 14819 - protein, 20 aa, synthetic construct
GGGGSGGGGSGGGGSGGGGS

SEQ ID NO: 14820 - protein, 9 aa, synthetic construct
GGSGGGPAP

SEQ ID NO: 14821 - protein, 6 aa, synthetic construct
GGGGGG

SEQ ID NO: 14822 - protein, 11 aa, synthetic construct
EAAAKPAPGSS

SEQ ID NO: 14823 - protein, 9 aa, synthetic construct
GGGGSSGGS

SEQ ID NO: 14824 - protein, 11 aa, synthetic construct
PAPGSSEAAAK

SEQ ID NO: 14825 - protein, 9 aa, synthetic construct
GGGGSSPAP

SEQ ID NO: 14826 - protein, 9 aa, synthetic construct
PAPGSSGGS

SEQ ID NO: 14827 - protein, 46 aa, synthetic construct; identical to SEQ ID NO: 5217

SEQ ID NO: 14828 - protein, 7 aa, synthetic construct
PAPAPAP

SEQ ID NO: 14829 - protein, 9 aa, synthetic construct
PAPGGGGGS

SEQ ID NO: 14830 - protein, 6 aa, synthetic construct
GGGGSS

SEQ ID NO: 14831 - protein, 20 aa, synthetic construct
EAAAKEAAAKEAAAKEAAAK

SEQ ID NO: 14832 - protein, 15 aa, synthetic construct
GGSGGSGGSGGSGGS

SEQ ID NO: 14833 - protein, 7 aa, synthetic construct
GGGGGGG

SEQ ID NO: 14834 - protein, 11 aa, synthetic construct
PAPGGGEAAAK

SEQ ID NO: 14835 - protein, 6 aa, synthetic construct
PAPGSS

SEQ ID NO: 14836 - protein, 10 aa, synthetic construct
GGGGSGGGGS

SEQ ID NO: 14837 - protein, 9 aa, synthetic construct
GSSGGSGGG

SEQ ID NO: 14838 - protein, 30 aa, synthetic construct; identical to SEQ ID NO: 5112

SEQ ID NO: 14839 - protein, 11 aa, synthetic construct
GSSEAAAKGGG

SEQ ID NO: 14840 - protein, 11 aa, synthetic construct
GGSEAAAKPAP

SEQ ID NO: 14841 - protein, 9 aa, synthetic construct
GSSGGSGGG

SEQ ID NO: 14842 - protein, 11 aa, synthetic construct
EAAAKGGGGSS

SEQ ID NO: 14843 - protein, 6 aa, synthetic construct
GGGGGG

SEQ ID NO: 14844 - protein, 5 aa, synthetic construct
GGGGG

SEQ ID NO: 14845 - protein, 11 aa, synthetic construct
PAPEAAAKGGG

SEQ ID NO: 14846 - protein, 11 aa, synthetic construct
EAAAKGGSPAP

SEQ ID NO: 14847 - protein, 11 aa, synthetic construct
GGGEAAAKPAP

SEQ ID NO: 14848 - protein, 18 aa, synthetic construct
GSSGSSGSSGSSGSSGSS

SEQ ID NO: 14849 - protein, 20 aa, synthetic construct
EAAAKEAAAKEAAAKEAAAK

SEQ ID NO: 14850 - protein, 11 aa, synthetic construct
PAPGSSEAAAK

SEQ ID NO: 14851 - protein, 9 aa, synthetic construct
GSSGSSGSS

SEQ ID NO: 14852 - protein, 9 aa, synthetic construct
GSSGGGPAP

SEQ ID NO: 14853 - protein, 11 aa, synthetic construct
GGGPAPEAAAK

SEQ ID NO: 14854 - protein, 8 aa, synthetic construct
GGGEAAAK

SEQ ID NO: 14855 - protein, 12 aa, synthetic construct
GSSGSSGSSGSS

SEQ ID NO: 14856 - protein, 11 aa, synthetic construct
PAPAPAPAPAP

SEQ ID NO: 14857 - protein, 11 aa, synthetic construct
GGSPAPEAAAK

SEQ ID NO: 14858 - protein, 18 aa, synthetic construct
GSSGSSGSSGSSGSSGSS

SEQ ID NO: 14859 - protein, 25 aa, synthetic construct
EAAAKEAAAKEAAAKEAAAKEAAAK

SEQ ID NO: 14860 - protein, 11 aa, synthetic construct
GGGPAPEAAAK

SEQ ID NO: 14861 - protein, 9 aa, synthetic construct
PAPGGSGGG

SEQ ID NO: 14862 - protein, 9 aa, synthetic construct
PAPGGSGGG

SEQ ID NO: 14863 - protein, 11 aa, synthetic construct
GGGEAAAKGGS

SEQ ID NO: 14864 - protein, 12 aa, synthetic construct
GSAGSAAGSGEF

SEQ ID NO: 14865 - protein, 9 aa, synthetic construct
GSSPAPGGG

SEQ ID NO: 14866 - protein, 18 aa, synthetic construct
GSSGSSGSSGSSGSSGSS

SEQ ID NO: 14867 - protein, 9 aa, synthetic construct
GGSGGGGSS

SEQ ID NO: 14868 - protein, 11 aa, synthetic construct
PAPEAAAKGSS

SEQ ID NO: 14869 - skipped

SEQ ID NO: 14870 - protein, 11 aa, synthetic construct
EAAAKGGGGSS

SEQ ID NO: 14871 - protein, 30 aa, synthetic construct; identical to SEQ ID NO: 5130

SEQ ID NO: 14872 - protein, 30 aa, synthetic construct; identical to SEQ ID NO: 5112

SEQ ID NO: 14873 - protein, 11 aa, synthetic construct
GGGEAAAKGGS

SEQ ID NO: 14874 - protein, 6 aa, synthetic construct
GSSGSS

SEQ ID NO: 14875 - protein, 9 aa, synthetic construct
GSSGGGGGS

SEQ ID NO: 14876 - protein, 11 aa, synthetic construct
GGGGSSEAAAK

SEQ ID NO: 14877 - protein, 11 aa, synthetic construct
EAAAKGSSGGS

SEQ ID NO: 14878 - protein, 11 aa, synthetic construct
GSSEAAAKGGS

SEQ ID NO: 14879 - protein, 11 aa, synthetic construct
EAAAKGSSPAP

SEQ ID NO: 14880 - protein, 11 aa, synthetic construct
EAAAKPAPGSS

SEQ ID NO: 14881 - protein, 9 aa, synthetic construct
PAPGSSGGG

SEQ ID NO: 14882 - protein, 30 aa, synthetic construct; identical to SEQ ID NO: 5112

SEQ ID NO: 14883 - protein, 25 aa, synthetic construct
EAAAKEAAAKEAAAKEAAAKEAAAK

SEQ ID NO: 14884 - protein, 11 aa, synthetic construct
GGGGSSEAAAK

SEQ ID NO: 14885 - protein, 11 aa, synthetic construct
EAAAKGGSPAP

SEQ ID NO: 14886 - protein, 11 aa, synthetic construct
PAPEAAAKGSS

SEQ ID NO: 14887 - protein, 9 aa, synthetic construct
GSSGGGGGS

SEQ ID NO: 14888 - protein, 9 aa, synthetic construct
GGGGSSPAP

SEQ ID NO: 14889 - protein, 11 aa, synthetic construct
EAAAKGGGGSS

SEQ ID NO: 14890 - protein, 9 aa, synthetic construct
PAPAPAPAP

SEQ ID NO: 14891 - protein, 11 aa, synthetic construct
GGSEAAAKGSS

SEQ ID NO: 14892 - protein, 9 aa, synthetic construct
GSSPAPGGG

SEQ ID NO: 14893 - protein, 6 aa, synthetic construct
GGGGGG

SEQ ID NO: 14894 - protein, 9 aa, synthetic construct
GGSGGSGGS

SEQ ID NO: 14895 - protein, 13 aa, synthetic construct
PAPAPAPAPAPAP

SEQ ID NO: 14896 - protein, 6 aa, synthetic construct
GSSPAP

SEQ ID NO: 14897 - protein, 9 aa, synthetic construct
GGGGGSGSS

SEQ ID NO: 14898 - protein, 11 aa, synthetic construct
EAAAKGSSGGS

SEQ ID NO: 14899 - protein, 5 aa, synthetic construct
EAAAK

SEQ ID NO: 14900 - protein, 8 aa, synthetic construct
PAPEAAAK

SEQ ID NO: 14901 - protein, 11 aa, synthetic construct
EAAAKGGSGSS

SEQ ID NO: 14902 - protein, 9 aa, synthetic construct
GGSGGSGGS

SEQ ID NO: 14903 - protein, 11 aa, synthetic construct
GSSGGGEAAAK

SEQ ID NO: 14904 - protein, 33 aa, synthetic construct; identical to SEQ ID NO: 5006

SEQ ID NO: 14905 - protein, 18 aa, synthetic construct
GGSGGSGGSGGSGGSGGS

SEQ ID NO: 14906 - protein, 8 aa, synthetic construct
GGGEAAAK

SEQ ID NO: 14907 - protein, 9 aa, synthetic construct
GGGGGSGSS

SEQ ID NO: 14908 - protein, 9 aa, synthetic construct
GSSPAPGGS

SEQ ID NO: 14909 - protein, 8 aa, synthetic construct
EAAAKGSS

SEQ ID NO: 14910 - protein, 9 aa, synthetic construct
GSSGGSGGG

SEQ ID NO: 14911 - protein, 9 aa, synthetic construct
GGSGGGGSS

SEQ ID NO: 14912 - protein, 9 aa, synthetic construct
GGSPAPGSS

SEQ ID NO: 14913 - protein, 18 aa, synthetic construct
GGSGGSGGSGGSGGSGGS

SEQ ID NO: 14914 - protein, 11 aa, synthetic construct
GSSEAAAKGGG

SEQ ID NO: 14915 - protein, 9 aa, synthetic construct
GGSGGSGGS

SEQ ID NO: 14916 - protein, 18 aa, synthetic construct
GSSGSSGSSGSSGSSGSS

SEQ ID NO: 14917 - protein, 15 aa, synthetic construct
GSSGSSGSSGSSGSS

SEQ ID NO: 14918 - protein, 8 aa, synthetic construct
PAPEAAAK

SEQ ID NO: 14919 - protein, 15 aa, synthetic construct
GSSGSSGSSGSSGSS

SEQ ID NO: 14920 - protein, 15 aa, synthetic construct
EAAAKGGGGSEAAAK

SEQ ID NO: 14921 - protein, 11 aa, synthetic construct
GGSPAPEAAAK

SEQ ID NO: 14922 - protein, 6 aa, synthetic construct
GSSGSS

SEQ ID NO: 14923 - skipped

SEQ ID NO: 14924 - protein, 15 aa, synthetic construct
GGGGSGGGGSGGGGS

SEQ ID NO: 14925 - protein, 30 aa, synthetic construct; identical to SEQ ID NO: 5130

SEQ ID NO: 14926 - protein, 9 aa, synthetic construct
GGSGSSPAP

SEQ ID NO: 14927 - protein, 8 aa, synthetic construct
GGGGGGGG

SEQ ID NO: 14928 - protein, 11 aa, synthetic construct
PAPGSSEAAAK

SEQ ID NO: 14929 - protein, 9 aa, synthetic construct
GGGGSSPAP

SEQ ID NO: 14930 - protein, 9 aa, synthetic construct
GSSGGSPAP

SEQ ID NO: 14931 - protein, 9 aa, synthetic construct
GSSGGGGGS

SEQ ID NO: 14932 - protein, 25 aa, synthetic construct
EAAAKEAAAKEAAAKEAAAKEAAAK

SEQ ID NO: 14933 - protein, 9 aa, synthetic construct
GSSGGGGGS

SEQ ID NO: 14934 - protein, 15 aa, synthetic construct
GGGGSEAAAKGGGGS

SEQ ID NO: 14935 - protein, 11 aa, synthetic construct
GGGEAAAKPAP

SEQ ID NO: 14936 - protein, 11 aa, synthetic construct
PAPGGGEAAAK

SEQ ID NO: 14937 - protein, 11 aa, synthetic construct
GGSGGGEAAAK

SEQ ID NO: 14938 - protein, 6 aa, synthetic construct
GSSGGG

SEQ ID NO: 14939 - protein, 11 aa, synthetic construct
EAAAKGSSGGS

SEQ ID NO: 14940 - protein, 5 aa, synthetic construct
GGGGG

SEQ ID NO: 14941 - protein, 6 aa, synthetic construct
GGGPAP

SEQ ID NO: 14942 - protein, 11 aa, synthetic construct
GSSGGSEAAAK

SEQ ID NO: 14943 - protein, 33 aa, synthetic construct; identical to SEQ ID NO: 5006

SEQ ID NO: 14944 - protein, 11 aa, synthetic construct
GSSGGGEAAAK

SEQ ID NO: 14945 - protein, 15 aa, synthetic construct
GSSGSSGSSGSSGSS

SEQ ID NO: 14946 - protein, 11 aa, synthetic construct
GGSEAAAKPAP

SEQ ID NO: 14947 - protein, 10 aa, synthetic construct
GGGGSGGGGS

SEQ ID NO: 14948 - protein, 11 aa, synthetic construct
GSSEAAAKPAP

SEQ ID NO: 14949 - protein, 15 aa, synthetic construct
GGGGSEAAAKGGGGS

SEQ ID NO: 14950 - protein, 11 aa, synthetic construct
PAPGSSEAAAK

SEQ ID NO: 14951 - protein, 11 aa, synthetic construct
EAAAKGGSGGG

SEQ ID NO: 14952 - protein, 9 aa, synthetic construct
GGGPAPGGS

SEQ ID NO: 14953 - protein, 11 aa, synthetic construct
GSSEAAAKGGS

SEQ ID NO: 14954 - protein, 11 aa, synthetic construct
EAAAKGGSGGG

SEQ ID NO: 14955 - protein, 9 aa, synthetic construct
GSSGGSPAP

SEQ ID NO: 14956 - protein, 5 aa, synthetic construct
PAPAP

SEQ ID NO: 14957 - protein, 9 aa, synthetic construct
PAPGGSGSS

SEQ ID NO: 14958 - protein, 11 aa, synthetic construct
EAAAKGGGGGS

SEQ ID NO: 14959 - protein, 11 aa, synthetic construct
PAPEAAAKGGS

SEQ ID NO: 14960 - protein, 11 aa, synthetic construct
GSSEAAAKPAP

SEQ ID NO: 14961 - protein, 6 aa, synthetic construct
GGSGGS

SEQ ID NO: 14962 - protein, 11 aa, synthetic construct
GSSEAAAKGGG

SEQ ID NO: 14963 - protein, 5 aa, synthetic construct
EAAAK

SEQ ID NO: 14964 - protein, 6 aa, synthetic construct
GSSPAP

SEQ ID NO: 14965 - protein, 11 aa, synthetic construct
EAAAKPAPGGG

SEQ ID NO: 14966 - protein, 15 aa, synthetic construct
GGGGSEAAAKGGGGS

SEQ ID NO: 14967 - protein, 11 aa, synthetic construct
EAAAKGSSGGS

SEQ ID NO: 14968 - protein, 12 aa, synthetic construct
GSAGSAAGSGEF

SEQ ID NO: 14969 - protein, 11 aa, synthetic construct
PAPEAAAKGGS

SEQ ID NO: 14970 - protein, 30 aa, synthetic construct; identical to SEQ ID NO: 5130

SEQ ID NO: 14971 - skipped

SEQ ID NO: 14972 - protein, 11 aa, synthetic construct
GGSEAAAKPAP

SEQ ID NO: 14973 - protein, 11 aa, synthetic construct
EAAAKGSSGGG

SEQ ID NO: 14974 - protein, 11 aa, synthetic construct
GGSEAAAKGGG

SEQ ID NO: 14975 - protein, 6 aa, synthetic construct
GGSGGS

SEQ ID NO: 14976 - protein, 11 aa, synthetic construct
GSSEAAAKGGS

SEQ ID NO: 14977 - protein, 11 aa, synthetic construct
PAPAPAPAPAP

SEQ ID NO: 14978 - protein, 11 aa, synthetic construct
GGSEAAAKGGG

SEQ ID NO: 14979 - protein, 9 aa, synthetic construct
PAPAPAPAP

SEQ ID NO: 14980 - protein, 25 aa, synthetic construct
GGGGSGGGGSGGGGSGGGGSGGGGS

SEQ ID NO: 14981 - protein, 11 aa, synthetic construct
PAPGGSEAAAK

SEQ ID NO: 14982 - protein, 9 aa, synthetic construct
GGSGGGPAP

SEQ ID NO: 14983 - protein, 18 aa, synthetic construct
GSSGSSGSSGSSGSSGSS

SEQ ID NO: 14984 - protein, 11 aa, synthetic construct
GGSEAAAKPAP

SEQ ID NO: 14985 - protein, 11 aa, synthetic construct
GGGEAAAKGSS

SEQ ID NO: 14986 - protein, 9 aa, synthetic construct
GGGPAPGGS

SEQ ID NO: 14987 - protein, 6 aa, synthetic construct
PAPGGG

SEQ ID NO: 14988 - protein, 11 aa, synthetic construct
GGSEAAAKGSS

SEQ ID NO: 14989 - protein, 11 aa, synthetic construct
GGGEAAAKGSS

SEQ ID NO: 14990 - protein, 11 aa, synthetic construct
GGGEAAAKGSS

SEQ ID NO: 14991 - protein, 20 aa, synthetic construct
EAAAKEAAAKEAAAKEAAAK

SEQ ID NO: 14992 - protein, 11 aa, synthetic construct
EAAAKGGGPAP

SEQ ID NO: 14993 - protein, 11 aa, synthetic construct
EAAAKGGGGSS

SEQ ID NO: 14994 - protein, 25 aa, synthetic construct
EAAAKEAAAKEAAAKEAAAKEAAAK

SEQ ID NO: 14995 - protein, 9 aa, synthetic construct
GSSGGGGGS

SEQ ID NO: 14996 - protein, 7 aa, synthetic construct
PAPAPAP

SEQ ID NO: 14997 - protein, 12 aa, synthetic construct
GGSGGSGGSGGS

SEQ ID NO: 14998 - protein, 8 aa, synthetic construct
GGGEAAAK

SEQ ID NO: 14999 - protein, 6 aa, synthetic construct
GGGGGS

SEQ ID NO: 15000 - protein, 6 aa, synthetic construct
GGSGGS

SEQ ID NO: 15001 - protein, 8 aa, synthetic construct
EAAAKGGS

SEQ ID NO: 15002 - protein, 6 aa, synthetic construct
GGGGSS

SEQ ID NO: 15003 - protein, 5 aa, synthetic construct
PAPAP

SEQ ID NO: 15004 - protein, 6 aa, synthetic construct
PAPGGG

SEQ ID NO: 15005 - protein, 11 aa, synthetic construct
EAAAKGGGGSS

SEQ ID NO: 15006 - protein, 11 aa, synthetic construct
PAPAPAPAPAP

SEQ ID NO: 15007 - protein, 6 aa, synthetic construct
GGGPAP

SEQ ID NO: 15008 - protein, 9 aa, synthetic construct
GSSGGSGGG

SEQ ID NO: 15009 - protein, 11 aa, synthetic construct
EAAAKGGGPAP

SEQ ID NO: 15010 - protein, 12 aa, synthetic construct
GSSGSSGSSGSS

SEQ ID NO: 15011 - protein, 10 aa, synthetic construct
GGGGSGGGGS

SEQ ID NO: 15012 - protein, 9 aa, synthetic construct
GSSGGSGGG

SEQ ID NO: 15013 - protein, 11 aa, synthetic construct
GGGEAAAKPAP

SEQ ID NO: 15014 - protein, 8 aa, synthetic construct
PAPEAAAK

SEQ ID NO: 15015 - protein, 12 aa, synthetic construct
GSSGSSGSSGSS

SEQ ID NO: 15016 - protein, 11 aa, synthetic construct
GSSEAAAKPAP

SEQ ID NO: 15017 - protein, 11 aa, synthetic construct
PAPEAAAKGGG

SEQ ID NO: 15018 - protein, 11 aa, synthetic construct
GGSEAAAKGSS

SEQ ID NO: 15019 - protein, 11 aa, synthetic construct
EAAAKPAPGGS

SEQ ID NO: 15020 - protein, 11 aa, synthetic construct
GSSGGSEAAAK

SEQ ID NO: 15021 - protein, 30 aa, synthetic construct; identical to SEQ ID NO: 5112

SEQ ID NO: 15022 - protein, 11 aa, synthetic construct
EAAAKGGGGSS

SEQ ID NO: 15023 - protein, 9 aa, synthetic construct
GGGGGSGSS

SEQ ID NO: 15024 - protein, 5 aa, synthetic construct
PAPAP

SEQ ID NO: 15025 - protein, 9 aa, synthetic construct
GGGGGSPAP

SEQ ID NO: 15026 - protein, 6 aa, synthetic construct
GGGPAP

SEQ ID NO: 15027 - protein, 15 aa, synthetic construct
EAAAKGGGGSEAAAK

SEQ ID NO: 15028 - protein, 11 aa, synthetic construct
GGSEAAAKGGG

SEQ ID NO: 15029 - protein, 9 aa, synthetic construct
GSSPAPGGS

SEQ ID NO: 15030 - protein, 7 aa, synthetic construct
GGGGGGG

SEQ ID NO: 15031 - protein, 8 aa, synthetic construct
EAAAKGSS

SEQ ID NO: 15032 - protein, 15 aa, synthetic construct
EAAAKGGGGSEAAAK

SEQ ID NO: 15033 - protein, 15 aa, synthetic construct
GGGGSEAAAKGGGGS

SEQ ID NO: 15034 - protein, 11 aa, synthetic construct
EAAAKGGGGSS

SEQ ID NO: 15035 - protein, 11 aa, synthetic construct
GGGEAAAKGGS

SEQ ID NO: 15036 - protein, 11 aa, synthetic construct
PAPEAAAKGGG

SEQ ID NO: 15037 - protein, 9 aa, synthetic construct
GGGGSSGGS

SEQ ID NO: 15038 - protein, 6 aa, synthetic construct
GGSGSS

SEQ ID NO: 15039 - protein, 13 aa, synthetic construct
PAPAPAPAPAPAP

SEQ ID NO: 15040 - protein, 8 aa, synthetic construct
EAAAKGGG

SEQ ID NO: 15041 - protein, 13 aa, synthetic construct
PAPAPAPAPAPAP

SEQ ID NO: 15042 - protein, 15 aa, synthetic construct
GSSGSSGSSGSSGSS

SEQ ID NO: 15043 - protein, 6 aa, synthetic construct
GGGGSS

SEQ ID NO: 15044 - protein, 11 aa, synthetic construct
PAPGGGEAAAK

SEQ ID NO: 15045 - protein, 11 aa, synthetic construct
GGSGGGEAAAK

SEQ ID NO: 15046 - protein, 11 aa, synthetic construct
PAPAPAPAPAP

SEQ ID NO: 15047 - protein, 11 aa, synthetic construct
GGGEAAAKGGS

SEQ ID NO: 15048 - protein, 11 aa, synthetic construct
GGGEAAAKGSS

SEQ ID NO: 15049 - protein, 11 aa, synthetic construct
GSSPAPEAAAK

SEQ ID NO: 15050 - protein, 25 aa, synthetic construct
EAAAKEAAAKEAAAKEAAAKEAAAK

SEQ ID NO: 15051 - protein, 6 aa, synthetic construct
PAPGGG

SEQ ID NO: 15052 - protein, 11 aa, synthetic construct
GSSEAAAKGGG

SEQ ID NO: 15053 - protein, 11 aa, synthetic construct
GGGGSSEAAAK

SEQ ID NO: 15054 - protein, 9 aa, synthetic construct
PAPGSSGGS

SEQ ID NO: 15055 - protein, 18 aa, synthetic construct
GSSGSSGSSGSSGSSGSS

SEQ ID NO: 15056 - protein, 11 aa, synthetic construct
EAAAKGSSGGG

SEQ ID NO: 15057 - protein, 9 aa, synthetic construct
PAPGGGGSS

SEQ ID NO: 15058 - protein, 6 aa, synthetic construct
GGSPAP

SEQ ID NO: 15059 - protein, 15 aa, synthetic construct
GGSGGSGGSGGSGGS

SEQ ID NO: 15060 - protein, 9 aa, synthetic construct
PAPAPAPAP

SEQ ID NO: 15061 - protein, 5 aa, synthetic construct
GGGGG

SEQ ID NO: 15062 - protein, 12 aa, synthetic construct
GGSGGSGGSGGS

SEQ ID NO: 15063 - protein, 15 aa, synthetic construct
GSSGSSGSSGSSGSS

SEQ ID NO: 15064 - protein, 11 aa, synthetic construct
PAPGGSEAAAK

SEQ ID NO: 15065 - protein, 9 aa, synthetic construct
PAPAPAPAP

SEQ ID NO: 15066 - protein, 9 aa, synthetic construct
PAPGGGGSS

SEQ ID NO: 15067 - protein, 6 aa, synthetic construct
GGSGSS

SEQ ID NO: 15068 - protein, 20 aa, synthetic construct
EAAAKEAAAKEAAAKEAAAK

SEQ ID NO: 15069 - protein, 11 aa, synthetic construct
EAAAKGGSGGG

SEQ ID NO: 15070 - protein, 9 aa, synthetic construct
PAPGGGGSS

SEQ ID NO: 15071 - protein, 11 aa, synthetic construct
EAAAKGGGGGS

SEQ ID NO: 15072 - protein, 6 aa, synthetic construct
GGGGGS

SEQ ID NO: 15073 - protein, 11 aa, synthetic construct
GGGEAAAKGGS

SEQ ID NO: 15074 - protein, 11 aa, synthetic construct
EAAAKPAPGGG

SEQ ID NO: 15075 - protein, 9 aa, synthetic construct
GGSGGGPAP

SEQ ID NO: 15076 - protein, 11 aa, synthetic construct
GSSEAAAKPAP

SEQ ID NO: 15077 - protein, 13 aa, synthetic construct
PAPAPAPAPAPAP

SEQ ID NO: 15078 - protein, 9 aa, synthetic construct
GGSPAPGGG

SEQ ID NO: 15079 - protein, 11 aa, synthetic construct
GGSGGGEAAAK

SEQ ID NO: 15080 - protein, 5 aa, synthetic construct
PAPAP

SEQ ID NO: 15081 - protein, 8 aa, synthetic construct
GSSEAAAK

SEQ ID NO: 15082 - protein, 15 aa, synthetic construct
GGGGSGGGGSGGGGS

SEQ ID NO: 15083 - protein, 9 aa, synthetic construct
GSSGSSGSS

SEQ ID NO: 15084 - protein, 11 aa, synthetic construct
EAAAKGGSGGG

SEQ ID NO: 15085 - protein, 6 aa, synthetic construct
GSSPAP

SEQ ID NO: 15086 - protein, 8 aa, synthetic construct
GGGEAAAK

SEQ ID NO: 15087 - protein, 46 aa, synthetic construct; identical to SEQ ID NO: 5217

SEQ ID NO: 15088 - protein, 6 aa, synthetic construct
PAPGGS

SEQ ID NO: 15089 - protein, 9 aa, synthetic construct
PAPGSSGGS

SEQ ID NO: 15090 - protein, 8 aa, synthetic construct
PAPEAAAK

SEQ ID NO: 15091 - protein, 5 aa, synthetic construct
PAPAP

SEQ ID NO: 15092 - protein, 8 aa, synthetic construct
EAAAKGGS

SEQ ID NO: 15093 - protein, 15 aa, synthetic construct
GGGGSEAAAKGGGGS

SEQ ID NO: 15094 - protein, 11 aa, synthetic construct
EAAAKGSSGGS

SEQ ID NO: 15095 - protein, 9 aa, synthetic construct
PAPGGSGSS

SEQ ID NO: 15096 - protein, 11 aa, synthetic construct
PAPGGSEAAAK

SEQ ID NO: 15097 - protein, 11 aa, synthetic construct
PAPGSSEAAAK

SEQ ID NO: 15098 - protein, 9 aa, synthetic construct
PAPGSSGGG

SEQ ID NO: 15099 - protein, 11 aa, synthetic construct
GSSGGGEAAAK

SEQ ID NO: 15100 - protein, 6 aa, synthetic construct
GGGGGG

SEQ ID NO: 15101 - protein, 11 aa, synthetic construct
PAPEAAAKGGG

SEQ ID NO: 15102 - protein, 11 aa, synthetic construct
GGGEAAAKGGS

SEQ ID NO: 15103 - protein, 11 aa, synthetic construct
PAPAPAPAPAP

SEQ ID NO: 15104 - protein, 18 aa, synthetic construct
GSSGSSGSSGSSGSSGSS

SEQ ID NO: 15105 - protein, 11 aa, synthetic construct
EAAAKGGGPAP

SEQ ID NO: 15106 - protein, 11 aa, synthetic construct
PAPAPAPAPAP

SEQ ID NO: 15107 - protein, 11 aa, synthetic construct
PAPGGSEAAAK

SEQ ID NO: 15108 - protein, 9 aa, synthetic construct
GSSGGGPAP

SEQ ID NO: 15109 - protein, 9 aa, synthetic construct
GGGGGSPAP

SEQ ID NO: 15110 - protein, 9 aa, synthetic construct
GSSGGSGGG

SEQ ID NO: 15111 - protein, 5 aa, synthetic construct
PAPAP

SEQ ID NO: 15112 - protein, 9 aa, synthetic construct
GSSGGGPAP

SEQ ID NO: 15113 - protein, 6 aa, synthetic construct
GGSGSS

SEQ ID NO: 15114 - protein, 11 aa, synthetic construct
GGSPAPEAAAK

SEQ ID NO: 15115 - protein, 11 aa, synthetic construct
EAAAKGGSGGG

SEQ ID NO: 15116 - protein, 11 aa, synthetic construct
GGGGSSEAAAK

SEQ ID NO: 15117 - protein, 9 aa, synthetic construct
GGGGGSGSS

SEQ ID NO: 15118 - protein, 9 aa, synthetic construct
GGGGSSGGS

SEQ ID NO: 15119 - protein, 15 aa, synthetic construct
EAAAKGGGGSEAAAK

SEQ ID NO: 15120 - protein, 11 aa, synthetic construct
PAPGGGEAAAK

SEQ ID NO: 15121 - protein, 11 aa, synthetic construct
PAPEAAAKGGG

SEQ ID NO: 15122 - protein, 46 aa, synthetic construct; identical to SEQ ID NO: 5217

SEQ ID NO: 15123 - protein, 11 aa, synthetic construct
GSSGGSEAAAK

SEQ ID NO: 15124 - protein, 6 aa, synthetic construct
GGSPAP

SEQ ID NO: 15125 - protein, 8 aa, synthetic construct
GSSEAAAK

SEQ ID NO: 15126 - protein, 8 aa, synthetic construct
GSSEAAAK

SEQ ID NO: 15127 - protein, 11 aa, synthetic construct
EAAAKGSSGGS

SEQ ID NO: 15128 - protein, 11 aa, synthetic construct
GGGEAAAKPAP

SEQ ID NO: 15129 - protein, 11 aa, synthetic construct
EAAAKGGSPAP

SEQ ID NO: 15130 - protein, 11 aa, synthetic construct
GSSEAAAKPAP

SEQ ID NO: 15131 - protein, 9 aa, synthetic construct
GSSGSSGSS

SEQ ID NO: 15132 - protein, 20 aa, synthetic construct
EAAAKEAAAKEAAAKEAAAK

SEQ ID NO: 15133 - protein, 5 aa, synthetic construct
EAAAK

SEQ ID NO: 15134 - protein, 6 aa, synthetic construct
PAPGSS

SEQ ID NO: 15135 - protein, 6 aa, synthetic construct
PAPGGS

SEQ ID NO: 15136 - protein, 6 aa, synthetic construct
GGSGGS

SEQ ID NO: 15137 - protein, 33 aa, synthetic construct; identical to SEQ ID NO: 5006

SEQ ID NO: 15138 - protein, 11 aa, synthetic construct
GGSGGGEAAAK

SEQ ID NO: 15139 - protein, 9 aa, synthetic construct
PAPGSSGGG

SEQ ID NO: 15140 - protein, 6 aa, synthetic construct
GGSGGS

SEQ ID NO: 15141 - protein, 6 aa, synthetic construct
GSSGSS

SEQ ID NO: 15142 - protein, 11 aa, synthetic construct
PAPGGSEAAAK

SEQ ID NO: 15143 - protein, 12 aa, synthetic construct
GSAGSAAGSGEF

SEQ ID NO: 15144 - protein, 6 aa, synthetic construct
PAPGGG

SEQ ID NO: 15145 - protein, 11 aa, synthetic construct
EAAAKGGSGSS

SEQ ID NO: 15146 - protein, 11 aa, synthetic construct
GSSGGGEAAAK

SEQ ID NO: 15147 - protein, 9 aa, synthetic construct
GGSGGGPAP

SEQ ID NO: 15148 - protein, 13 aa, synthetic construct
PAPAPAPAPAPAP

SEQ ID NO: 15149 - protein, 16 aa, synthetic construct
SGSETPGTSESATPES

SEQ ID NO: 15150 - protein, 9 aa, synthetic construct
GGSGGSGGS

SEQ ID NO: 15151 - protein, 6 aa, synthetic construct
GGGGSS

SEQ ID NO: 15152 - protein, 11 aa, synthetic construct
GGGGGSEAAAK

SEQ ID NO: 15153 - protein, 16 aa, synthetic construct
SGSETPGTSESATPES

SEQ ID NO: 15154 - protein, 7 aa, synthetic construct
PAPAPAP

SEQ ID NO: 15155 - protein, 11 aa, synthetic construct
PAPEAAAKGSS

SEQ ID NO: 15156 - protein, 15 aa, synthetic construct
GSSGSSGSSGSSGSS

SEQ ID NO: 15157 - protein, 9 aa, synthetic construct
GGGPAPGSS

SEQ ID NO: 15158 - protein, 9 aa, synthetic construct
GGSGGGGSS

SEQ ID NO: 15159 - protein, 16 aa, synthetic construct
SGSETPGTSESATPES

SEQ ID NO: 15160 - protein, 11 aa, synthetic construct
EAAAKGSSGGS

SEQ ID NO: 15161 - protein, 11 aa, synthetic construct
GSSPAPEAAAK

SEQ ID NO: 15162 - protein, 11 aa, synthetic construct
GSSPAPEAAAK

SEQ ID NO: 15163 - protein, 9 aa, synthetic construct
GGGGSSPAP

SEQ ID NO: 15164 - protein, 11 aa, synthetic construct
PAPGGGEAAAK

SEQ ID NO: 15165 - protein, 11 aa, synthetic construct
PAPEAAAKGGS

SEQ ID NO: 15166 - protein, 18 aa, synthetic construct
GSSGSSGSSGSSGSSGSS

SEQ ID NO: 15167 - protein, 9 aa, synthetic construct
GGSPAPGSS

SEQ ID NO: 15168 - protein, 9 aa, synthetic construct
GGGPAPGGS

SEQ ID NO: 15169 - protein, 9 aa, synthetic construct
GGGPAPGSS

SEQ ID NO: 15170 - protein, 8 aa, synthetic construct
EAAAKPAP

SEQ ID NO: 15171 - protein, 15 aa, synthetic construct
EAAAKEAAAKEAAAK

SEQ ID NO: 15172 - protein, 11 aa, synthetic construct
GSSGGSEAAAK

SEQ ID NO: 15173 - protein, 9 aa, synthetic construct
PAPGGGGGS

SEQ ID NO: 15174 - protein, 8 aa, synthetic construct
GGGEAAAK

SEQ ID NO: 15175 - protein, 11 aa, synthetic construct
EAAAKGGGPAP

SEQ ID NO: 15176 - protein, 9 aa, synthetic construct
GGSGSSGGG

SEQ ID NO: 15177 - protein, 11 aa, synthetic construct
PAPEAAAKGSS

SEQ ID NO: 15178 - protein, 9 aa, synthetic construct
PAPGGGGGS

SEQ ID NO: 15179 - protein, 11 aa, synthetic construct
EAAAKGGGGGS

SEQ ID NO: 15180 - protein, 6 aa, synthetic construct
GGGGGS

SEQ ID NO: 15181 - protein, 25 aa, synthetic construct
GGGGSGGGGSGGGGSGGGGSGGGGS

SEQ ID NO: 15182 - protein, 11 aa, synthetic construct
EAAAKGGSPAP

SEQ ID NO: 15183 - protein, 9 aa, synthetic construct
GGGGSSPAP

SEQ ID NO: 15184 - protein, 9 aa, synthetic construct
GGGGSSGGS

SEQ ID NO: 15185 - protein, 9 aa, synthetic construct
PAPGSSGGS

SEQ ID NO: 15186 - protein, 6 aa, synthetic construct
GGGGGS

SEQ ID NO: 15187 - protein, 9 aa, synthetic construct
GGSGSSGGG

SEQ ID NO: 15188 - protein, 11 aa, synthetic construct
GSSGGSEAAAK

SEQ ID NO: 15189 - protein, 20 aa, synthetic construct
EAAAKEAAAKEAAAKEAAAK

SEQ ID NO: 15190 - protein, 11 aa, synthetic construct
GGSEAAAKGGG

SEQ ID NO: 15191 - protein, 33 aa, synthetic construct; identical to SEQ ID NO: 5006

SEQ ID NO: 15192 - protein, 11 aa, synthetic construct
GSSEAAAKGGS

SEQ ID NO: 15193 - protein, 30 aa, synthetic construct; identical to SEQ ID NO: 5112

SEQ ID NO: 15194 - protein, 8 aa, synthetic construct
GGGEAAAK

SEQ ID NO: 15195 - protein, 9 aa, synthetic construct
PAPAPAPAP

SEQ ID NO: 15196 - protein, 9 aa, synthetic construct
PAPGSSGGG

SEQ ID NO: 15197 - protein, 15 aa, synthetic construct
GSSGSSGSSGSSGSS

SEQ ID NO: 15198 - protein, 6 aa, synthetic construct
GGSPAP

SEQ ID NO: 15199 - protein, 30 aa, synthetic construct; identical to SEQ ID NO: 5112

SEQ ID NO: 15200 - protein, 8 aa, synthetic construct
PAPEAAAK

SEQ ID NO: 15201 - protein, 9 aa, synthetic construct
PAPGSSGGG

SEQ ID NO: 15202 - protein, 11 aa, synthetic construct
GGGGGSEAAAK

SEQ ID NO: 15203 - protein, 11 aa, synthetic construct
PAPAPAPAPAP

SEQ ID NO: 15204 - protein, 11 aa, synthetic construct
EAAAKGGSGSS

SEQ ID NO: 15205 - protein, 20 aa, synthetic construct
EAAAKEAAAKEAAAKEAAAK

SEQ ID NO: 15206 - protein, 9 aa, synthetic construct
PAPAPAPAP

SEQ ID NO: 15207 - protein, 9 aa, synthetic construct
GGGPAPGSS

SEQ ID NO: 15208 - protein, 11 aa, synthetic construct
PAPEAAAKGSS

SEQ ID NO: 15209 - protein, 9 aa, synthetic construct
GGSPAPGGG

SEQ ID NO: 15210 - protein, 20 aa, synthetic construct
GGGGSGGGGSGGGGSGGGGS

SEQ ID NO: 15211 - protein, 8 aa, synthetic construct
EAAAKGGS

SEQ ID NO: 15212 - protein, 9 aa, synthetic construct
PAPGSSGGS

SEQ ID NO: 15213 - protein, 10 aa, synthetic construct
GGGGSGGGGS

SEQ ID NO: 15214 - protein, 6 aa, synthetic construct
GGSGGS

SEQ ID NO: 15215 - protein, 15 aa, synthetic construct
EAAAKGGGGSEAAAK

SEQ ID NO: 15216 - protein, 20 aa, synthetic construct
EAAAKEAAAKEAAAKEAAAK

SEQ ID NO: 15217 - protein, 11 aa, synthetic construct
PAPGGGEAAAK

SEQ ID NO: 15218 - protein, 6 aa, synthetic construct
GSSGSS

SEQ ID NO: 15219 - protein, 11 aa, synthetic construct
EAAAKGGGGGS

SEQ ID NO: 15220 - protein, 11 aa, synthetic construct
GSSPAPEAAAK

SEQ ID NO: 15221 - protein, 8 aa, synthetic construct
GGGEAAAK

SEQ ID NO: 15222 - protein, 11 aa, synthetic construct
PAPEAAAKGSS

SEQ ID NO: 15223 - protein, 11 aa, synthetic construct
GGGGSSEAAAK

SEQ ID NO: 15224 - protein, 9 aa, synthetic construct
PAPGSSGGS

SEQ ID NO: 15225 - protein, 11 aa, synthetic construct
EAAAKGGGGGS

SEQ ID NO: 15226 - protein, 20 aa, synthetic construct
GGGGSGGGGSGGGGSGGGGS

SEQ ID NO: 15227 - protein, 11 aa, synthetic construct
EAAAKGGGGSS

SEQ ID NO: 15228 - protein, 11 aa, synthetic construct
GGGEAAAKGGS

SEQ ID NO: 15229 - protein, 9 aa, synthetic construct
GGGGGSPAP

SEQ ID NO: 15230 - protein, 11 aa, synthetic construct
GGSGGGEAAAK

SEQ ID NO: 15231 - protein, 9 aa, synthetic construct
PAPGGGGGS

SEQ ID NO: 15232 - protein, 15 aa, synthetic construct
EAAAKGGGGSEAAAK

SEQ ID NO: 15233 - protein, 11 aa, synthetic construct
PAPEAAAKGSS

SEQ ID NO: 15234 - protein, 11 aa, synthetic construct
GGSEAAAKGGG

SEQ ID NO: 15235 - protein, 15 aa, synthetic construct
GGSGGSGGSGGSGGS

SEQ ID NO: 15236 - protein, 15 aa, synthetic construct
GGSGGSGGSGGSGGS

SEQ ID NO: 15237 - protein, 6 aa, synthetic construct
GGGGGG

SEQ ID NO: 15238 - protein, 9 aa, synthetic construct
GGGGGSGSS

SEQ ID NO: 15239 - protein, 11 aa, synthetic construct
GGSEAAAKPAP

SEQ ID NO: 15240 - protein, 9 aa, synthetic construct
GGGPAPGSS

SEQ ID NO: 15241 - protein, 6 aa, synthetic construct
GGGGGS

SEQ ID NO: 15242 - protein, 11 aa, synthetic construct
GGSPAPEAAAK

SEQ ID NO: 15243 - protein, 11 aa, synthetic construct
PAPEAAAKGGS

SEQ ID NO: 15244 - protein, 11 aa, synthetic construct
EAAAKGGSGSS

SEQ ID NO: 15245 - protein, 11 aa, synthetic construct
GGGPAPEAAAK

SEQ ID NO: 15246 - protein, 9 aa, synthetic construct
PAPGGGGSS

SEQ ID NO: 15247 - protein, 9 aa, synthetic construct
GSSPAPGGG

SEQ ID NO: 15248 - protein, 9 aa, synthetic construct
GGGGSSGGS

SEQ ID NO: 15249 - protein, 11 aa, synthetic construct
EAAAKGGGGGS

SEQ ID NO: 15250 - protein, 11 aa, synthetic construct
GGSEAAAKGSS

SEQ ID NO: 15251 - protein, 6 aa, synthetic construct
GSSGGG

SEQ ID NO: 15252 - protein, 12 aa, synthetic construct
GGSGGSGGSGGS

SEQ ID NO: 15253 - protein, 8 aa, synthetic construct
EAAAKPAP

SEQ ID NO: 15254 - protein, 9 aa, synthetic construct
GGGGSSGGS

SEQ ID NO: 15255 - protein, 6 aa, synthetic construct
GGSGGS

SEQ ID NO: 15256 - protein, 11 aa, synthetic construct
EAAAKGGGGGS

SEQ ID NO: 15257 - protein, 30 aa, synthetic construct; identical to SEQ ID NO: 5112

SEQ ID NO: 15258 - protein, 9 aa, synthetic construct
GGSGGSGGS

SEQ ID NO: 15259 - protein, 11 aa, synthetic construct
GGGGGSEAAAK

SEQ ID NO: 15260 - protein, 9 aa, synthetic construct
GGSGSSPAP

SEQ ID NO: 15261 - protein, 15 aa, synthetic construct
EAAAKEAAAKEAAAK

SEQ ID NO: 15262 - protein, 11 aa, synthetic construct
PAPEAAAKGGS

SEQ ID NO: 15263 - protein, 11 aa, synthetic construct
GGSGSSEAAAK

SEQ ID NO: 15264 - protein, 9 aa, synthetic construct
GGGGGSGSS

SEQ ID NO: 15265 - protein, 9 aa, synthetic construct
GGGPAPGGS

SEQ ID NO: 15266 - protein, 16 aa, synthetic construct
SGSETPGTSESATPES

SEQ ID NO: 15267 - protein, 9 aa, synthetic construct
GSSPAPGGS

SEQ ID NO: 15268 - protein, 15 aa, synthetic construct
GSSGSSGSSGSSGSS

SEQ ID NO: 15269 - protein, 11 aa, synthetic construct
EAAAKGGGPAP

SEQ ID NO: 15270 - protein, 6 aa, synthetic construct
GSSGGG

SEQ ID NO: 15271 - protein, 11 aa, synthetic construct
GGGEAAAKPAP

SEQ ID NO: 15272 - protein, 9 aa, synthetic construct
PAPGGSGGG

SEQ ID NO: 15273 - protein, 9 aa, synthetic construct
GSSGGSGGG

SEQ ID NO: 15274 - protein, 6 aa, synthetic construct
GGSGGG

SEQ ID NO: 15275 - protein, 11 aa, synthetic construct
EAAAKGGSPAP

SEQ ID NO: 15276 - protein, 11 aa, synthetic construct
GGSPAPEAAAK

SEQ ID NO: 15277 - protein, 11 aa, synthetic construct
GSSGGSEAAAK

SEQ ID NO: 15278 - protein, 12 aa, synthetic construct
GSAGSAAGSGEF

SEQ ID NO: 15279 - protein, 9 aa, synthetic construct
PAPGGSGSS

SEQ ID NO: 15280 - protein, 11 aa, synthetic construct
GGSEAAAKGGG

SEQ ID NO: 15281 - protein, 9 aa, synthetic construct
GGSPAPGSS

SEQ ID NO: 15282 - protein, 9 aa, synthetic construct
GSSGGSGGG

SEQ ID NO: 15283 - protein, 11 aa, synthetic construct
PAPEAAAKGGG

SEQ ID NO: 15284 - protein, 11 aa, synthetic construct
GGGEAAAKPAP

SEQ ID NO: 15285 - protein, 8 aa, synthetic construct
GGSEAAAK

SEQ ID NO: 15286 - protein, 11 aa, synthetic construct
GGGEAAAKGSS

SEQ ID NO: 15287 - protein, 11 aa, synthetic construct
GGGGGSEAAAK

SEQ ID NO: 15288 - protein, 11 aa, synthetic construct
PAPAPAPAPAP

SEQ ID NO: 15289 - protein, 11 aa, synthetic construct
PAPAPAPAPAP

SEQ ID NO: 15290 - protein, 9 aa, synthetic construct
GGGGSSGGS

SEQ ID NO: 15291 - protein, 11 aa, synthetic construct
PAPGGSEAAAK

SEQ ID NO: 15292 - protein, 11 aa, synthetic construct
PAPAPAPAPAP

SEQ ID NO: 15293 - protein, 11 aa, synthetic construct
EAAAKPAPGGG

SEQ ID NO: 15294 - protein, 8 aa, synthetic construct
GGSEAAAK

SEQ ID NO: 15295 - protein, 11 aa, synthetic construct
GGGEAAAKGSS

SEQ ID NO: 15296 - protein, 9 aa, synthetic construct
GGSPAPGSS

SEQ ID NO: 15297 - protein, 11 aa, synthetic construct
GGSEAAAKPAP

SEQ ID NO: 15298 - protein, 11 aa, synthetic construct
PAPEAAAKGGG

SEQ ID NO: 15299 - protein, 11 aa, synthetic construct
GSSEAAAKPAP

SEQ ID NO: 15300 - protein, 15 aa, synthetic construct
GGGGSEAAAKGGGGS

SEQ ID NO: 15301 - protein, 11 aa, synthetic construct
GSSEAAAKGGS

SEQ ID NO: 15302 - protein, 15 aa, synthetic construct
GSSGSSGSSGSSGSS

SEQ ID NO: 15303 - protein, 9 aa, synthetic construct
GGGGGSPAP

SEQ ID NO: 15304 - protein, 8 aa, synthetic construct
GGSEAAAK

SEQ ID NO: 15305 - protein, 11 aa, synthetic construct
GSSPAPEAAAK

SEQ ID NO: 15306 - protein, 9 aa, synthetic construct
GGGPAPGGS

SEQ ID NO: 15307 - protein, 11 aa, synthetic construct
GGSPAPEAAAK

SEQ ID NO: 15308 - protein, 11 aa, synthetic construct
GGSEAAAKPAP

SEQ ID NO: 15309 - protein, 9 aa, synthetic construct
PAPAPAPAP

SEQ ID NO: 15310 - protein, 9 aa, synthetic construct
GSSPAPGGG

SEQ ID NO: 15311 - protein, 12 aa, synthetic construct
GSSGSSGSSGSS

SEQ ID NO: 15312 - protein, 11 aa, synthetic construct
GGSEAAAKGSS

SEQ ID NO: 15313 - protein, 9 aa, synthetic construct
GGSGSSGGG

SEQ ID NO: 15314 - protein, 18 aa, synthetic construct
GSSGSSGSSGSSGSSGSS

SEQ ID NO: 15315 - protein, 11 aa, synthetic construct
GGSEAAAKPAP

SEQ ID NO: 15316 - protein, 9 aa, synthetic construct
GSSGGSGGG

SEQ ID NO: 15317 - protein, 46 aa, synthetic construct; identical to SEQ ID NO: 5217

SEQ ID NO: 15318 - protein, 11 aa, synthetic construct
GGSPAPEAAAK

SEQ ID NO: 15319 - protein, 11 aa, synthetic construct
GGGGSSEAAAK

SEQ ID NO: 15320 - protein, 11 aa, synthetic construct
GGSGGGEAAAK

SEQ ID NO: 15321 - protein, 15 aa, synthetic construct
GGGGSEAAAKGGGGS

SEQ ID NO: 15322 - protein, 11 aa, synthetic construct
GGSGSSEAAAK

SEQ ID NO: 15323 - protein, 11 aa, synthetic construct
GGSEAAAKPAP

SEQ ID NO: 15324 - protein, 11 aa, synthetic construct
GSSGGGEAAAK

SEQ ID NO: 15325 - protein, 6 aa, synthetic construct
GSSGGS

SEQ ID NO: 15326 - protein, 11 aa, synthetic construct
GGSEAAAKPAP

SEQ ID NO: 15327 - protein, 11 aa, synthetic construct
GSSGGSEAAAK

SEQ ID NO: 15328 - protein, 11 aa, synthetic construct
GSSPAPEAAAK

SEQ ID NO: 15329 - protein, 18 aa, synthetic construct
GGSGGSGGSGGSGGSGGS

SEQ ID NO: 15330 - protein, 15 aa, synthetic construct
GSSGSSGSSGSSGSS

SEQ ID NO: 15331 - protein, 11 aa, synthetic construct
EAAAKGGGGSS

SEQ ID NO: 15332 - protein, 11 aa, synthetic construct
GGGEAAAKGSS

SEQ ID NO: 15333-15400 - skipped (68 entries)

SEQ ID NO: 15401 - protein, 46 aa, synthetic construct; identical to SEQ ID NO: 5217

SEQ ID NO: 15402 - protein, 46 aa, synthetic construct; identical to SEQ ID NO: 5217

SEQ ID NO: 15403 - protein, 46 aa, synthetic construct; identical to SEQ ID NO: 5217

SEQ ID NO: 15404 - protein, 46 aa, synthetic construct; identical to SEQ ID NO: 5217

SEQ ID NO: 15405 - protein, 20 aa, synthetic construct
GGGGSGGGGSGGGGSGGGGS

SEQ ID NO: 15406 - protein, 30 aa, synthetic construct; identical to SEQ ID NO: 5112

SEQ ID NO: 15407 - protein, 30 aa, synthetic construct; identical to SEQ ID NO: 5112

SEQ ID NO: 15408 - protein, 18 aa, synthetic construct
GSSGSSGSSGSSGSSGSS

SEQ ID NO: 15409 - protein, 20 aa, synthetic construct
EAAAKEAAAKEAAAKEAAAK

SEQ ID NO: 15410 - protein, 30 aa, synthetic construct; identical to SEQ ID NO: 5130

SEQ ID NO: 15411 - protein, 11 aa, synthetic construct
PAPAPAPAPAP

SEQ ID NO: 15412 - protein, 13 aa, synthetic construct
PAPAPAPAPAPAP

SEQ ID NO: 15413 - protein, 13 aa, synthetic construct
PAPAPAPAPAPAP

SEQ ID NO: 15414 - protein, 13 aa, synthetic construct
PAPAPAPAPAPAP

SEQ ID NO: 15415 - protein, 13 aa, synthetic construct
PAPAPAPAPAPAP

SEQ ID NO: 15416 - protein, 13 aa, synthetic construct
PAPAPAPAPAPAP

SEQ ID NO: 15417 - protein, 8 aa, synthetic construct
EAAAKGGG

SEQ ID NO: 15418 - protein, 8 aa, synthetic construct
EAAAKGGG

SEQ ID NO: 15419 - protein, 6 aa, synthetic construct
PAPGGG

SEQ ID NO: 15420 - protein, 9 aa, synthetic construct
GGGGSSGGS

SEQ ID NO: 15421 - protein, 11 aa, synthetic construct
GGGGGSEAAAK

SEQ ID NO: 15422 - protein, 11 aa, synthetic construct
GGGEAAAKGGS

SEQ ID NO: 15423 - protein, 11 aa, synthetic construct
GGGEAAAKGGS

SEQ ID NO: 15424 - protein, 11 aa, synthetic construct
GGGEAAAKGGS

SEQ ID NO: 15425 - protein, 9 aa, synthetic construct
GGSGGGPAP

SEQ ID NO: 15426 - protein, 9 aa, synthetic construct
PAPGGSGGG

SEQ ID NO: 15427 - protein, 9 aa, synthetic construct
PAPGGSGGG

SEQ ID NO: 15428 - protein, 11 aa, synthetic construct
GGSEAAAKPAP

SEQ ID NO: 15429 - protein, 11 aa, synthetic construct
GGSPAPEAAAK

SEQ ID NO: 15430 - protein, 11 aa, synthetic construct
GGSPAPEAAAK

SEQ ID NO: 15431 - protein, 11 aa, synthetic construct
EAAAKGGSPAP

SEQ ID NO: 15432 - protein, 11 aa, synthetic construct
EAAAKGGSPAP

SEQ ID NO: 15433 - protein, 11 aa, synthetic construct
EAAAKPAPGGS

SEQ ID NO: 15434 - protein, 11 aa, synthetic construct
EAAAKPAPGGS

SEQ ID NO: 15435 - protein, 11 aa, synthetic construct
GGGGSSEAAAK

SEQ ID NO: 15436 - protein, 11 aa, synthetic construct
GGGGSSEAAAK

SEQ ID NO: 15437 - protein, 11 aa, synthetic construct
GSSGGGEAAAK

SEQ ID NO: 15438 - protein, 11 aa, synthetic construct
GSSGGGEAAAK

SEQ ID NO: 15439 - protein, 11 aa, synthetic construct
GSSEAAAKGGG

SEQ ID NO: 15440 - protein, 9 aa, synthetic construct
GSSGGGPAP

SEQ ID NO: 15441 - protein, 9 aa, synthetic construct
GSSPAPGGG

SEQ ID NO: 15442 - protein, 9 aa, synthetic construct
PAPGGGGSS

SEQ ID NO: 15443 - protein, 11 aa, synthetic construct
GGGEAAAKPAP

SEQ ID NO: 15444 - protein, 11 aa, synthetic construct
GGGEAAAKPAP

SEQ ID NO: 15445 - protein, 11 aa, synthetic construct
GGGPAPEAAAK

SEQ ID NO: 15446 - protein, 11 aa, synthetic construct
GSSEAAAKPAP

SEQ ID NO: 15447 - protein, 11 aa, synthetic construct
GSSEAAAKPAP

SEQ ID NO: 15448 - protein, 11 aa, synthetic construct
GSSPAPEAAAK

SEQ ID NO: 15449 - protein, 11 aa, synthetic construct
GSSPAPEAAAK

SEQ ID NO: 15450 - protein, 11 aa, synthetic construct
GSSPAPEAAAK

SEQ ID NO: 15451 - protein, 11 aa, synthetic construct
PAPGSSEAAAK

SEQ ID NO: 15452 - protein, 11 aa, synthetic construct
PAPGSSEAAAK

SEQ ID NO: 15453 - protein, 46 aa, synthetic construct; identical to SEQ ID NO: 5217

SEQ ID NO: 15454 - protein, 46 aa, synthetic construct; identical to SEQ ID NO: 5217

SEQ ID NO: 15455 - protein, 46 aa, synthetic construct; identical to SEQ ID NO: 5217

SEQ ID NO: 15456 - protein, 46 aa, synthetic construct; identical to SEQ ID NO: 5217

SEQ ID NO: 15457 - protein, 46 aa, synthetic construct; identical to SEQ ID NO: 5217

SEQ ID NO: 15458 - protein, 46 aa, synthetic construct; identical to SEQ ID NO: 5217

SEQ ID NO: 15459 - protein, 46 aa, synthetic construct; identical to SEQ ID NO: 5217

SEQ ID NO: 15460 - protein, 16 aa, synthetic construct
SGSETPGTSESATPES

SEQ ID NO: 15461-16916 - skipped (1456 entries)

SEQ ID NO: 16917 - DNA, 21 bp, synthetic construct
  source 1..21: mol_type = other DNA
tggtgcatctgactcctgtgg

SEQ ID NO: 16918 - DNA, 21 bp, synthetic construct
  source 1..21: mol_type = other DNA
tggtgcatctgactcctgtgg

SEQ ID NO: 16919 - DNA, 21 bp, synthetic construct
  source 1..21: mol_type = other DNA
tggtgcatctgactcctgtgg

SEQ ID NO: 16920 - DNA, 21 bp, synthetic construct
  source 1..21: mol_type = other DNA
tggtgcatctgactcctgtgg

SEQ ID NO: 16921 - DNA, 20 bp, synthetic construct
  source 1..20: mol_type = other DNA
ggtgcatctgactcctgtgg

SEQ ID NO: 16922 - DNA, 20 bp, synthetic construct
  source 1..20: mol_type = other DNA
ggtgcatctgactcctgtgg

SEQ ID NO: 16923 - DNA, 20 bp, synthetic construct
  source 1..20: mol_type = other DNA
ggtgcatctgactcctgtgg

SEQ ID NO: 16924 - DNA, 20 bp, synthetic construct
  source 1..20: mol_type = other DNA
ggtgcatctgactcctgtgg

SEQ ID NO: 16925 - DNA, 20 bp, synthetic construct
  source 1..20: mol_type = other DNA
ggtgcatctgactcctgtgg

SEQ ID NO: 16926 - DNA, 24 bp, synthetic construct
  source 1..24: mol_type = other DNA
ccatggtgcatctgactcctgtgg

SEQ ID NO: 16927 - DNA, 20 bp, synthetic construct
  source 1..20: mol_type = other DNA
ggtgcatctgactcctgtgg

SEQ ID NO: 16928 - DNA, 20 bp, synthetic construct
  source 1..20: mol_type = other DNA
ggtgcatctgactcctgtgg

SEQ ID NO: 16929 - DNA, 23 bp, synthetic construct
  source 1..23: mol_type = other DNA
ccatggtgcatctgactcctgtg

SEQ ID NO: 16930 - DNA, 21 bp, synthetic construct
  source 1..21: mol_type = other DNA
atggtgcatctgactcctgtg

SEQ ID NO: 16931 - DNA, 23 bp, synthetic construct
  source 1..23: mol_type = other DNA
gcagtaacggcagacttctccac

SEQ ID NO: 16932 - DNA, 21 bp, synthetic construct
  source 1..21: mol_type = other DNA
agtaacggcagacttctccac

SEQ ID NO: 16933 - DNA, 23 bp, synthetic construct
  source 1..23: mol_type = other DNA
gcagtaacggcagacttctccac

SEQ ID NO: 16934 - DNA, 21 bp, synthetic construct
  source 1..21: mol_type = other DNA
agtaacggcagacttctccac

SEQ ID NO: 16935 - DNA, 21 bp, synthetic construct
  source 1..21: mol_type = other DNA
agtaacggcagacttctccac

SEQ ID NO: 16936 - DNA, 21 bp, synthetic construct
  source 1..21: mol_type = other DNA
agtaacggcagacttctccac

SEQ ID NO: 16937 - DNA, 20 bp, synthetic construct
  source 1..20: mol_type = other DNA
tggtgcatctgactcctgtg

SEQ ID NO: 16938 - DNA, 20 bp, synthetic construct
  source 1..20: mol_type = other DNA
tggtgcatctgactcctgtg

SEQ ID NO: 16939 - DNA, 20 bp, synthetic construct
  source 1..20: mol_type = other DNA
tggtgcatctgactcctgtg

SEQ ID NO: 16940 - DNA, 20 bp, synthetic construct
  source 1..20: mol_type = other DNA
tggtgcatctgactcctgtg

SEQ ID NO: 16941 - DNA, 20 bp, synthetic construct
  source 1..20: mol_type = other DNA
gtaacggcagacttctccac

SEQ ID NO: 16942 - DNA, 20 bp, synthetic construct
  source 1..20: mol_type = other DNA
gtaacggcagacttctccac

SEQ ID NO: 16943 - DNA, 20 bp, synthetic construct
  source 1..20: mol_type = other DNA
gtaacggcagacttctccac

SEQ ID NO: 16944 - DNA, 20 bp, synthetic construct
  source 1..20: mol_type = other DNA
gtaacggcagacttctccac

SEQ ID NO: 16945 - DNA, 20 bp, synthetic construct
  source 1..20: mol_type = other DNA
gtaacggcagacttctccac

SEQ ID NO: 16946 - DNA, 20 bp, synthetic construct
  source 1..20: mol_type = other DNA
gtaacggcagacttctccac

SEQ ID NO: 16947 - DNA, 20 bp, synthetic construct
  source 1..20: mol_type = other DNA
gtaacggcagacttctccac

SEQ ID NO: 16948 - DNA, 20 bp, synthetic construct
  source 1..20: mol_type = other DNA
gtaacggcagacttctccac

SEQ ID NO: 16949 - DNA, 20 bp, synthetic construct
  source 1..20: mol_type = other DNA
gtaacggcagacttctccac

SEQ ID NO: 16950 - DNA, 20 bp, synthetic construct
  source 1..20: mol_type = other DNA
gtaacggcagacttctccac

SEQ ID NO: 16951 - DNA, 21 bp, synthetic construct
  source 1..21: mol_type = other DNA
atggtgcatctgactcctgtg

SEQ ID NO: 16952 - DNA, 21 bp, synthetic construct
  source 1..21: mol_type = other DNA
atggtgcatctgactcctgtg

SEQ ID NO: 16953 - DNA, 20 bp, synthetic construct
  source 1..20: mol_type = other DNA
tggtgcatctgactcctgtg

SEQ ID NO: 16954 - DNA, 20 bp, synthetic construct
  source 1..20: mol_type = other DNA
gtaacggcagacttctccac

SEQ ID NO: 16955 - DNA, 23 bp, synthetic construct
  source 1..23: mol_type = other DNA
ggcagtaacggcagacttctcca

SEQ ID NO: 16956 - DNA, 21 bp, synthetic construct
  source 1..21: mol_type = other DNA
cagtaacggcagacttctcca

SEQ ID NO: 16957 - DNA, 21 bp, synthetic construct
  source 1..21: mol_type = other DNA
catggtgcatctgactcctgt

SEQ ID NO: 16958 - DNA, 21 bp, synthetic construct
  source 1..21: mol_type = other DNA
cagtaacggcagacttctcca

SEQ ID NO: 16959 - DNA, 21 bp, synthetic construct
  source 1..21: mol_type = other DNA
cagtaacggcagacttctcca

SEQ ID NO: 16960 - DNA, 21 bp, synthetic construct
  source 1..21: mol_type = other DNA
catggtgcatctgactcctgt

SEQ ID NO: 16961 - DNA, 20 bp, synthetic construct
  source 1..20: mol_type = other DNA
atggtgcatctgactcctgt

SEQ ID NO: 16962 - DNA, 20 bp, synthetic construct
  source 1..20: mol_type = other DNA
agtaacggcagacttctcca

SEQ ID NO: 16963 - DNA, 20 bp, synthetic construct
  source 1..20: mol_type = other DNA
agtaacggcagacttctcca

SEQ ID NO: 16964 - DNA, 20 bp, synthetic construct
  source 1..20: mol_type = other DNA
agtaacggcagacttctcca

SEQ ID NO: 16965 - DNA, 20 bp, synthetic construct
  source 1..20: mol_type = other DNA
agtaacggcagacttctcca

SEQ ID NO: 16966 - DNA, 20 bp, synthetic construct
  source 1..20: mol_type = other DNA
atggtgcatctgactcctgt

SEQ ID NO: 16967 - DNA, 20 bp, synthetic construct
  source 1..20: mol_type = other DNA
atggtgcatctgactcctgt

SEQ ID NO: 16968 - DNA, 20 bp, synthetic construct
  source 1..20: mol_type = other DNA
atggtgcatctgactcctgt

SEQ ID NO: 16969 - DNA, 20 bp, synthetic construct
  source 1..20: mol_type = other DNA
atggtgcatctgactcctgt

SEQ ID NO: 16970 - DNA, 20 bp, synthetic construct
  source 1..20: mol_type = other DNA
atggtgcatctgactcctgt

SEQ ID NO: 16971 - DNA, 21 bp, synthetic construct
  source 1..21: mol_type = other DNA
catggtgcatctgactcctgt

SEQ ID NO: 16972 - DNA, 21 bp, synthetic construct
  source 1..21: mol_type = other DNA
catggtgcatctgactcctgt

SEQ ID NO: 16973 - DNA, 21 bp, synthetic construct
  source 1..21: mol_type = other DNA
cagtaacggcagacttctcca

SEQ ID NO: 16974 - DNA, 21 bp, synthetic construct
  source 1..21: mol_type = other DNA
cagtaacggcagacttctcca

SEQ ID NO: 16975 - DNA, 23 bp, synthetic construct
  source 1..23: mol_type = other DNA
caccatggtgcatctgactcctg

SEQ ID NO: 16976 - DNA, 21 bp, synthetic construct
  source 1..21: mol_type = other DNA
ccatggtgcatctgactcctg

SEQ ID NO: 16977 - DNA, 21 bp, synthetic construct
  source 1..21: mol_type = other DNA
gcagtaacggcagacttctcc

SEQ ID NO: 16978 - DNA, 21 bp, synthetic construct
  source 1..21: mol_type = other DNA
gcagtaacggcagacttctcc

SEQ ID NO: 16979 - DNA, 20 bp, synthetic construct
  source 1..20: mol_type = other DNA
catggtgcatctgactcctg

SEQ ID NO: 16980 - DNA, 20 bp, synthetic construct
  source 1..20: mol_type = other DNA
catggtgcatctgactcctg

SEQ ID NO: 16981 - DNA, 20 bp, synthetic construct
  source 1..20: mol_type = other DNA
catggtgcatctgactcctg

SEQ ID NO: 16982 - DNA, 20 bp, synthetic construct
  source 1..20: mol_type = other DNA
catggtgcatctgactcctg

SEQ ID NO: 16983 - DNA, 20 bp, synthetic construct
  source 1..20: mol_type = other DNA
catggtgcatctgactcctg

SEQ ID NO: 16984 - DNA, 20 bp, synthetic construct
  source 1..20: mol_type = other DNA
catggtgcatctgactcctg

SEQ ID NO: 16985 - DNA, 20 bp, synthetic construct
  source 1..20: mol_type = other DNA
catggtgcatctgactcctg

SEQ ID NO: 16986 - DNA, 20 bp, synthetic construct
  source 1..20: mol_type = other DNA
catggtgcatctgactcctg

SEQ ID NO: 16987 - DNA, 20 bp, synthetic construct
  source 1..20: mol_type = other DNA
catggtgcatctgactcctg

SEQ ID NO: 16988 - DNA, 20 bp, synthetic construct
  source 1..20: mol_type = other DNA
catggtgcatctgactcctg

SEQ ID NO: 16989 - DNA, 20 bp, synthetic construct
  source 1..20: mol_type = other DNA
cagtaacggcagacttctcc

SEQ ID NO: 16990 - DNA, 21 bp, synthetic construct
  source 1..21: mol_type = other DNA
ccatggtgcatctgactcctg

SEQ ID NO: 16991 - DNA, 21 bp, synthetic construct
  source 1..21: mol_type = other DNA
ccatggtgcatctgactcctg

SEQ ID NO: 16992 - DNA, 21 bp, synthetic construct
  source 1..21: mol_type = other DNA
gcagtaacggcagacttctcc

SEQ ID NO: 16993 - DNA, 21 bp, synthetic construct
  source 1..21: mol_type = other DNA
gcagtaacggcagacttctcc

SEQ ID NO: 16994 - DNA, 20 bp, synthetic construct
  source 1..20: mol_type = other DNA
catggtgcatctgactcctg

SEQ ID NO: 16995 - DNA, 23 bp, synthetic construct
  source 1..23: mol_type = other DNA
acaccatggtgcatctgactcct

SEQ ID NO: 16996 - DNA, 21 bp, synthetic construct
  source 1..21: mol_type = other DNA
accatggtgcatctgactcct

SEQ ID NO: 16997 - DNA, 21 bp, synthetic construct
  source 1..21: mol_type = other DNA
ggcagtaacggcagacttctc

SEQ ID NO: 16998 - DNA, 21 bp, synthetic construct
  source 1..21: mol_type = other DNA
accatggtgcatctgactcct

SEQ ID NO: 16999 - DNA, 21 bp, synthetic construct
  source 1..21: mol_type = other DNA
accatggtgcatctgactcct

SEQ ID NO: 17000 - DNA, 20 bp, synthetic construct
  source 1..20: mol_type = other DNA
ccatggtgcatctgactcct

SEQ ID NO: 17001 - DNA, 20 bp, synthetic construct
  source 1..20: mol_type = other DNA
ccatggtgcatctgactcct

SEQ ID NO: 17002 - DNA, 20 bp, synthetic construct
  source 1..20: mol_type = other DNA
ccatggtgcatctgactcct

SEQ ID NO: 17003 - DNA, 20 bp, synthetic construct
  source 1..20: mol_type = other DNA
ccatggtgcatctgactcct

SEQ ID NO: 17004 - DNA, 20 bp, synthetic construct
  source 1..20: mol_type = other DNA
gcagtaacggcagacttctc

SEQ ID NO: 17005 - DNA, 21 bp, synthetic construct
  source 1..21: mol_type = other DNA
accatggtgcatctgactcct

SEQ ID NO: 17006 - DNA, 21 bp, synthetic construct
  source 1..21: mol_type = other DNA
accatggtgcatctgactcct

SEQ ID NO: 17007 - DNA, 21 bp, synthetic construct
  source 1..21: mol_type = other DNA
ggcagtaacggcagacttctc

SEQ ID NO: 17008 - DNA, 21 bp, synthetic construct
  source 1..21: mol_type = other DNA
ggcagtaacggcagacttctc

SEQ ID NO: 17009 - DNA, 20 bp, synthetic construct
  source 1..20: mol_type = other DNA
gcagtaacggcagacttctc

SEQ ID NO: 17010 - DNA, 21 bp, synthetic construct
  source 1..21: mol_type = other DNA
caccatggtgcatctgactcc

SEQ ID NO: 17011 - DNA, 20 bp, synthetic construct
  source 1..20: mol_type = other DNA
accatggtgcatctgactcc

SEQ ID NO: 17012 - DNA, 20 bp, synthetic construct
  source 1..20: mol_type = other DNA
accatggtgcatctgactcc

SEQ ID NO: 17013 - DNA, 20 bp, synthetic construct
  source 1..20: mol_type = other DNA
accatggtgcatctgactcc

SEQ ID NO: 17014 - DNA, 20 bp, synthetic construct
  source 1..20: mol_type = other DNA
accatggtgcatctgactcc

SEQ ID NO: 17015 - DNA, 20 bp, synthetic construct
  source 1..20: mol_type = other DNA
accatggtgcatctgactcc

SEQ ID NO: 17016 - DNA, 20 bp, synthetic construct
  source 1..20: mol_type = other DNA
ggcagtaacggcagacttct

SEQ ID NO: 17017 - DNA, 20 bp, synthetic construct
  source 1..20: mol_type = other DNA
caccatggtgcatctgactc

SEQ ID NO: 17018 - DNA, 20 bp, synthetic construct
  source 1..20: mol_type = other DNA
caccatggtgcatctgactc

SEQ ID NO: 17019 - DNA, 20 bp, synthetic construct
  source 1..20: mol_type = other DNA
caccatggtgcatctgactc

SEQ ID NO: 17020 - DNA, 20 bp, synthetic construct
  source 1..20: mol_type = other DNA
caccatggtgcatctgactc

SEQ ID NO: 17021 - DNA, 20 bp, synthetic construct
  source 1..20: mol_type = other DNA
gggcagtaacggcagacttc

SEQ ID NO: 17022 - DNA, 23 bp, synthetic construct
  source 1..23: mol_type = other DNA
acagggcagtaacggcagacttc

SEQ ID NO: 17023 - DNA, 23 bp, synthetic construct
  source 1..23: mol_type = other DNA
acagggcagtaacggcagacttc

SEQ ID NO: 17024 - DNA, 20 bp, synthetic construct
  source 1..20: mol_type = other DNA
agggcagtaacggcagactt

SEQ ID NO: 17025 - DNA, 20 bp, synthetic construct
  source 1..20: mol_type = other DNA
acaccatggtgcatctgact

SEQ ID NO: 17026 - DNA, 20 bp, synthetic construct
  source 1..20: mol_type = other DNA
cagggcagtaacggcagact

SEQ ID NO: 17027 - DNA, 20 bp, synthetic construct
  source 1..20: mol_type = other DNA
gacaccatggtgcatctgac

SEQ ID NO: 17028 - DNA, 23 bp, synthetic construct
  source 1..23: mol_type = other DNA
ccacagggcagtaacggcagact

SEQ ID NO: 17029 - DNA, 24 bp, synthetic construct
  source 1..24: mol_type = other DNA
ccccacagggcagtaacggcagac

SEQ ID NO: 17030 - DNA, 20 bp, synthetic construct
  source 1..20: mol_type = other DNA
acagggcagtaacggcagac

SEQ ID NO: 17031 - DNA, 20 bp, synthetic construct
  source 1..20: mol_type = other DNA
agacaccatggtgcatctga

SEQ ID NO: 17032 - DNA, 23 bp, synthetic construct
  source 1..23: mol_type = other DNA
cccacagggcagtaacggcagac

SEQ ID NO: 17033 - DNA, 20 bp, synthetic construct
  source 1..20: mol_type = other DNA
cacagggcagtaacggcaga

SEQ ID NO: 17034 - DNA, 20 bp, synthetic construct
  source 1..20: mol_type = other DNA
cagacaccatggtgcatctg

SEQ ID NO: 17035 - DNA, 23 bp, synthetic construct
  source 1..23: mol_type = other DNA
aaacagacaccatggtgcatctg

SEQ ID NO: 17036 - DNA, 23 bp, synthetic construct
  source 1..23: mol_type = other DNA
aaacagacaccatggtgcatctg

SEQ ID NO: 17037 - DNA, 24 bp, synthetic construct
  source 1..24: mol_type = other DNA
tcaaacagacaccatggtgcatct

SEQ ID NO: 17038 - DNA, 20 bp, synthetic construct
  source 1..20: mol_type = other DNA
acagacaccatggtgcatct

SEQ ID NO: 17039 - DNA, 20 bp, synthetic construct
  source 1..20: mol_type = other DNA
ccacagggcagtaacggcag

SEQ ID NO: 17040 - DNA, 23 bp, synthetic construct
  source 1..23: mol_type = other DNA
caaacagacaccatggtgcatct

SEQ ID NO: 17041 - DNA, 23 bp, synthetic construct
  source 1..23: mol_type = other DNA
gccccacagggcagtaacggcag

SEQ ID NO: 17042 - DNA, 23 bp, synthetic construct
  source 1..23: mol_type = other DNA
caaacagacaccatggtgcatct

SEQ ID NO: 17043 - DNA, 20 bp, synthetic construct
  source 1..20: mol_type = other DNA
acagacaccatggtgcatct

SEQ ID NO: 17044 - DNA, 20 bp, synthetic construct
  source 1..20: mol_type = other DNA
aacagacaccatggtgcatc

SEQ ID NO: 17045 - DNA, 20 bp, synthetic construct
  source 1..20: mol_type = other DNA
aacagacaccatggtgcatc

SEQ ID NO: 17046 - DNA, 20 bp, synthetic construct
  source 1..20: mol_type = other DNA
aacagacaccatggtgcatc

SEQ ID NO: 17047 - DNA, 20 bp, synthetic construct
  source 1..20: mol_type = other DNA
cccacagggcagtaacggca

SEQ ID NO: 17048 - DNA, 20 bp, synthetic construct
  source 1..20: mol_type = other DNA
aacagacaccatggtgcatc

SEQ ID NO: 17049 - DNA, 20 bp, synthetic construct
  source 1..20: mol_type = other DNA
aacagacaccatggtgcatc

SEQ ID NO: 17050 - DNA, 22 bp, synthetic construct
  source 1..22: mol_type = other DNA
caaacagacaccatggtgcatc

SEQ ID NO: 17051 - DNA, 20 bp, synthetic construct
  source 1..20: mol_type = other DNA
aacagacaccatggtgcatc

SEQ ID NO: 17052 - DNA, 20 bp, synthetic construct
  source 1..20: mol_type = other DNA
aacagacaccatggtgcatc

SEQ ID NO: 17053 - DNA, 20 bp, synthetic construct
  source 1..20: mol_type = other DNA
cccacagggcagtaacggca

SEQ ID NO: 17054 - DNA, 20 bp, synthetic construct
  source 1..20: mol_type = other DNA
aaacagacaccatggtgcat

SEQ ID NO: 17055 - DNA, 20 bp, synthetic construct
  source 1..20: mol_type = other DNA
aaacagacaccatggtgcat

SEQ ID NO: 17056 - DNA, 20 bp, synthetic construct
  source 1..20: mol_type = other DNA
aaacagacaccatggtgcat

SEQ ID NO: 17057 - DNA, 20 bp, synthetic construct
  source 1..20: mol_type = other DNA
aaacagacaccatggtgcat

SEQ ID NO: 17058 - DNA, 20 bp, synthetic construct
  source 1..20: mol_type = other DNA
ccccacagggcagtaacggc

SEQ ID NO: 17059 - DNA, 20 bp, synthetic construct
  source 1..20: mol_type = other DNA
ccccacagggcagtaacggc

SEQ ID NO: 17060 - DNA, 20 bp, synthetic construct
  source 1..20: mol_type = other DNA
ccccacagggcagtaacggc

SEQ ID NO: 17061 - DNA, 20 bp, synthetic construct
  source 1..20: mol_type = other DNA
ccccacagggcagtaacggc

SEQ ID NO: 17062 - DNA, 20 bp, synthetic construct
  source 1..20: mol_type = other DNA
ccccacagggcagtaacggc

SEQ ID NO: 17063 - DNA, 23 bp, synthetic construct
  source 1..23: mol_type = other DNA
ctcaaacagacaccatggtgcat

SEQ ID NO: 17064 - DNA, 21 bp, synthetic construct
  source 1..21: mol_type = other DNA
caaacagacaccatggtgcat

SEQ ID NO: 17065 - DNA, 21 bp, synthetic construct
  source 1..21: mol_type = other DNA
caaacagacaccatggtgcat

SEQ ID NO: 17066 - DNA, 22 bp, synthetic construct
  source 1..22: mol_type = other DNA
tgccccacagggcagtaacggc

SEQ ID NO: 17067 - DNA, 22 bp, synthetic construct
  source 1..22: mol_type = other DNA
tcaaacagacaccatggtgcat

SEQ ID NO: 17068 - DNA, 20 bp, synthetic construct
  source 1..20: mol_type = other DNA
ccccacagggcagtaacggc

SEQ ID NO: 17069 - DNA, 20 bp, synthetic construct
  source 1..20: mol_type = other DNA
ccccacagggcagtaacggc

SEQ ID NO: 17070 - DNA, 21 bp, synthetic construct
  source 1..21: mol_type = other DNA
tcaaacagacaccatggtgca

SEQ ID NO: 17071 - DNA, 20 bp, synthetic construct
  source 1..20: mol_type = other DNA
gccccacagggcagtaacgg

SEQ ID NO: 17072 - DNA, 20 bp, synthetic construct
  source 1..20: mol_type = other DNA
gccccacagggcagtaacgg

SEQ ID NO: 17073 - DNA, 20 bp, synthetic construct
  source 1..20: mol_type = other DNA
gccccacagggcagtaacgg

SEQ ID NO: 17074 - DNA, 20 bp, synthetic construct
  source 1..20: mol_type = other DNA
gccccacagggcagtaacgg

SEQ ID NO: 17075 - DNA, 20 bp, synthetic construct
  source 1..20: mol_type = other DNA
caaacagacaccatggtgca

SEQ ID NO: 17076 - DNA, 23 bp, synthetic construct
  source 1..23: mol_type = other DNA
cttgccccacagggcagtaacgg

SEQ ID NO: 17077 - DNA, 21 bp, synthetic construct
  source 1..21: mol_type = other DNA
tgccccacagggcagtaacgg

SEQ ID NO: 17078 - DNA, 21 bp, synthetic construct
  source 1..21: mol_type = other DNA
tgccccacagggcagtaacgg

SEQ ID NO: 17079 - DNA, 22 bp, synthetic construct
  source 1..22: mol_type = other DNA
ttgccccacagggcagtaacgg

SEQ ID NO: 17080 - DNA, 20 bp, synthetic construct
  source 1..20: mol_type = other DNA
gccccacagggcagtaacgg

SEQ ID NO: 17081 - DNA, 21 bp, synthetic construct
  source 1..21: mol_type = other DNA
ttgccccacagggcagtaacg

SEQ ID NO: 17082 - DNA, 21 bp, synthetic construct
  source 1..21: mol_type = other DNA
ttgccccacagggcagtaacg

SEQ ID NO: 17083 - DNA, 20 bp, synthetic construct
  source 1..20: mol_type = other DNA
tgccccacagggcagtaacg

SEQ ID NO: 17084 - DNA, 20 bp, synthetic construct
  source 1..20: mol_type = other DNA
tcaaacagacaccatggtgc

SEQ ID NO: 17085 - DNA, 21 bp, synthetic construct
  source 1..21: mol_type = other DNA
ttgccccacagggcagtaacg

SEQ ID NO: 17086 - DNA, 21 bp, synthetic construct
  source 1..21: mol_type = other DNA
ttgccccacagggcagtaacg

SEQ ID NO: 17087 - DNA, 24 bp, synthetic construct
  source 1..24: mol_type = other DNA
aacctcaaacagacaccatggtgc

SEQ ID NO: 17088 - DNA, 21 bp, synthetic construct
  source 1..21: mol_type = other DNA
cttgccccacagggcagtaac

SEQ ID NO: 17089 - DNA, 20 bp, synthetic construct
  source 1..20: mol_type = other DNA
ttgccccacagggcagtaac

SEQ ID NO: 17090 - DNA, 20 bp, synthetic construct
  source 1..20: mol_type = other DNA
ttgccccacagggcagtaac

SEQ ID NO: 17091 - DNA, 20 bp, synthetic construct
  source 1..20: mol_type = other DNA
ttgccccacagggcagtaac

SEQ ID NO: 17092 - DNA, 20 bp, synthetic construct
  source 1..20: mol_type = other DNA
ttgccccacagggcagtaac

SEQ ID NO: 17093 - DNA, 20 bp, synthetic construct
  source 1..20: mol_type = other DNA
ttgccccacagggcagtaac

SEQ ID NO: 17094 - DNA, 20 bp, synthetic construct
  source 1..20: mol_type = other DNA
ctcaaacagacaccatggtg

SEQ ID NO: 17095 - DNA, 21 bp, synthetic construct
  source 1..21: mol_type = other DNA
cttgccccacagggcagtaac

SEQ ID NO: 17096 - DNA, 21 bp, synthetic construct
  source 1..21: mol_type = other DNA
cttgccccacagggcagtaac

SEQ ID NO: 17097 - DNA, 24 bp, synthetic construct
  source 1..24: mol_type = other DNA
caccttgccccacagggcagtaac

SEQ ID NO: 17098 - DNA, 20 bp, synthetic construct
  source 1..20: mol_type = other DNA
ctcaaacagacaccatggtg

SEQ ID NO: 17099 - DNA, 20 bp, synthetic construct
  source 1..20: mol_type = other DNA
ttgccccacagggcagtaac

SEQ ID NO: 17100 - DNA, 20 bp, synthetic construct
  source 1..20: mol_type = other DNA
cttgccccacagggcagtaa

SEQ ID NO: 17101 - DNA, 20 bp, synthetic construct
  source 1..20: mol_type = other DNA
cttgccccacagggcagtaa

SEQ ID NO: 17102 - DNA, 20 bp, synthetic construct
  source 1..20: mol_type = other DNA
cttgccccacagggcagtaa

SEQ ID NO: 17103 - DNA, 20 bp, synthetic construct
  source 1..20: mol_type = other DNA
cttgccccacagggcagtaa

SEQ ID NO: 17104 - DNA, 20 bp, synthetic construct
  source 1..20: mol_type = other DNA
cttgccccacagggcagtaa

SEQ ID NO: 17105 - DNA, 20 bp, synthetic construct
  source 1..20: mol_type = other DNA
cttgccccacagggcagtaa

SEQ ID NO: 17106 - DNA, 20 bp, synthetic construct
  source 1..20: mol_type = other DNA
cttgccccacagggcagtaa

SEQ ID NO: 17107 - DNA, 20 bp, synthetic construct
  source 1..20: mol_type = other DNA
cttgccccacagggcagtaa

SEQ ID NO: 17108 - DNA, 20 bp, synthetic construct
  source 1..20: mol_type = other DNA
cttgccccacagggcagtaa

SEQ ID NO: 17109 - DNA, 20 bp, synthetic construct
  source 1..20: mol_type = other DNA
cttgccccacagggcagtaa

SEQ ID NO: 17110 - DNA, 20 bp, synthetic construct
  source 1..20: mol_type = other DNA
cctcaaacagacaccatggt

SEQ ID NO: 17111 - DNA, 23 bp, synthetic construct
  source 1..23: mol_type = other DNA
caacctcaaacagacaccatggt

SEQ ID NO: 17112 - DNA, 23 bp, synthetic construct
  source 1..23: mol_type = other DNA
caacctcaaacagacaccatggt

SEQ ID NO: 17113 - DNA, 20 bp, synthetic construct
  source 1..20: mol_type = other DNA
cttgccccacagggcagtaa

SEQ ID NO: 17114 - DNA, 21 bp, synthetic construct
  source 1..21: mol_type = other DNA
accttgccccacagggcagta

SEQ ID NO: 17115 - DNA, 21 bp, synthetic construct
  source 1..21: mol_type = other DNA
accttgccccacagggcagta

SEQ ID NO: 17116 - DNA, 20 bp, synthetic construct
  source 1..20: mol_type = other DNA
ccttgccccacagggcagta

SEQ ID NO: 17117 - DNA, 20 bp, synthetic construct
  source 1..20: mol_type = other DNA
ccttgccccacagggcagta

SEQ ID NO: 17118 - DNA, 20 bp, synthetic construct
  source 1..20: mol_type = other DNA
ccttgccccacagggcagta

SEQ ID NO: 17119 - DNA, 20 bp, synthetic construct
  source 1..20: mol_type = other DNA
ccttgccccacagggcagta

SEQ ID NO: 17120 - DNA, 20 bp, synthetic construct
  source 1..20: mol_type = other DNA
acctcaaacagacaccatgg

SEQ ID NO: 17121 - DNA, 20 bp, synthetic construct
  source 1..20: mol_type = other DNA
acctcaaacagacaccatgg

SEQ ID NO: 17122 - DNA, 20 bp, synthetic construct
  source 1..20: mol_type = other DNA
acctcaaacagacaccatgg

SEQ ID NO: 17123 - DNA, 20 bp, synthetic construct
  source 1..20: mol_type = other DNA
acctcaaacagacaccatgg

SEQ ID NO: 17124 - DNA, 20 bp, synthetic construct
  source 1..20: mol_type = other DNA
acctcaaacagacaccatgg

SEQ ID NO: 17125 - DNA, 23 bp, synthetic construct
  source 1..23: mol_type = other DNA
tcaccttgccccacagggcagta

SEQ ID NO: 17126 - DNA, 23 bp, synthetic construct
  source 1..23: mol_type = other DNA
tcaccttgccccacagggcagta

SEQ ID NO: 17127 - DNA, 20 bp, synthetic construct
  source 1..20: mol_type = other DNA
acctcaaacagacaccatgg

SEQ ID NO: 17128 - DNA, 21 bp, synthetic construct
  source 1..21: mol_type = other DNA
caccttgccccacagggcagt

SEQ ID NO: 17129 - DNA, 20 bp, synthetic construct
  source 1..20: mol_type = other DNA
aacctcaaacagacaccatg

SEQ ID NO: 17130 - DNA, 20 bp, synthetic construct
  source 1..20: mol_type = other DNA
aacctcaaacagacaccatg

SEQ ID NO: 17131 - DNA, 20 bp, synthetic construct
  source 1..20: mol_type = other DNA
aacctcaaacagacaccatg

SEQ ID NO: 17132 - DNA, 20 bp, synthetic construct
  source 1..20: mol_type = other DNA
aacctcaaacagacaccatg

SEQ ID NO: 17133 - DNA, 20 bp, synthetic construct
  source 1..20: mol_type = other DNA
accttgccccacagggcagt

SEQ ID NO: 17134 - DNA, 21 bp, synthetic construct
  source 1..21: mol_type = other DNA
caccttgccccacagggcagt

SEQ ID NO: 17135 - DNA, 21 bp, synthetic construct
  source 1..21: mol_type = other DNA
caccttgccccacagggcagt

SEQ ID NO: 17136 - DNA, 22 bp, synthetic construct
  source 1..22: mol_type = other DNA
gcaacctcaaacagacaccatg

SEQ ID NO: 17137 - DNA, 20 bp, synthetic construct
  source 1..20: mol_type = other DNA
caacctcaaacagacaccat

SEQ ID NO: 17138 - DNA, 20 bp, synthetic construct
  source 1..20: mol_type = other DNA
caacctcaaacagacaccat

SEQ ID NO: 17139 - DNA, 20 bp, synthetic construct
  source 1..20: mol_type = other DNA
caacctcaaacagacaccat

SEQ ID NO: 17140 - DNA, 20 bp, synthetic construct
  source 1..20: mol_type = other DNA
caccttgccccacagggcag

SEQ ID NO: 17141 - DNA, 20 bp, synthetic construct
  source 1..20: mol_type = other DNA
caacctcaaacagacaccat

SEQ ID NO: 17142 - DNA, 20 bp, synthetic construct
  source 1..20: mol_type = other DNA
caacctcaaacagacaccat

SEQ ID NO: 17143 - DNA, 23 bp, synthetic construct
  source 1..23: mol_type = other DNA
tagcaacctcaaacagacaccat

SEQ ID NO: 17144 - DNA, 20 bp, synthetic construct
  source 1..20: mol_type = other DNA
caccttgccccacagggcag

SEQ ID NO: 17145 - DNA, 21 bp, synthetic construct
  source 1..21: mol_type = other DNA
tcaccttgccccacagggcag

SEQ ID NO: 17146 - DNA, 20 bp, synthetic construct
  source 1..20: mol_type = other DNA
gcaacctcaaacagacacca

SEQ ID NO: 17147 - DNA, 20 bp, synthetic construct
  source 1..20: mol_type = other DNA
gcaacctcaaacagacacca

SEQ ID NO: 17148 - DNA, 20 bp, synthetic construct
  source 1..20: mol_type = other DNA
gcaacctcaaacagacacca

SEQ ID NO: 17149 - DNA, 20 bp, synthetic construct
  source 1..20: mol_type = other DNA
gcaacctcaaacagacacca

SEQ ID NO: 17150 - DNA, 20 bp, synthetic construct
  source 1..20: mol_type = other DNA
gcaacctcaaacagacacca

SEQ ID NO: 17151 - DNA, 20 bp, synthetic construct
  source 1..20: mol_type = other DNA
gcaacctcaaacagacacca

SEQ ID NO: 17152 - DNA, 20 bp, synthetic construct
  source 1..20: mol_type = other DNA
gcaacctcaaacagacacca

SEQ ID NO: 17153 - DNA, 20 bp, synthetic construct
  source 1..20: mol_type = other DNA
gcaacctcaaacagacacca

SEQ ID NO: 17154 - DNA, 20 bp, synthetic construct
  source 1..20: mol_type = other DNA
gcaacctcaaacagacacca

SEQ ID NO: 17155 - DNA, 20 bp, synthetic construct
  source 1..20: mol_type = other DNA
gcaacctcaaacagacacca

SEQ ID NO: 17156 - DNA, 20 bp, synthetic construct
  source 1..20: mol_type = other DNA
tcaccttgccccacagggca

SEQ ID NO: 17157 - DNA, 23 bp, synthetic construct
  source 1..23: mol_type = other DNA
cgttcaccttgccccacagggca

SEQ ID NO: 17158 - DNA, 20 bp, synthetic construct
  source 1..20: mol_type = other DNA
gcaacctcaaacagacacca

SEQ ID NO: 17159 - DNA, 21 bp, synthetic construct
  source 1..21: mol_type = other DNA
gttcaccttgccccacagggc

SEQ ID NO: 17160 - DNA, 21 bp, synthetic construct
  source 1..21: mol_type = other DNA
tagcaacctcaaacagacacc

SEQ ID NO: 17161 - DNA, 21 bp, synthetic construct
  source 1..21: mol_type = other DNA
tagcaacctcaaacagacacc

SEQ ID NO: 17162 - DNA, 20 bp, synthetic construct
  source 1..20: mol_type = other DNA
agcaacctcaaacagacacc

SEQ ID NO: 17163 - DNA, 20 bp, synthetic construct
  source 1..20: mol_type = other DNA
agcaacctcaaacagacacc

SEQ ID NO: 17164 - DNA, 20 bp, synthetic construct
  source 1..20: mol_type = other DNA
agcaacctcaaacagacacc

SEQ ID NO: 17165 - DNA, 20 bp, synthetic construct
  source 1..20: mol_type = other DNA
agcaacctcaaacagacacc

SEQ ID NO: 17166 - DNA, 20 bp, synthetic construct
  source 1..20: mol_type = other DNA
ttcaccttgccccacagggc

SEQ ID NO: 17167 - DNA, 20 bp, synthetic construct
  source 1..20: mol_type = other DNA
ttcaccttgccccacagggc

SEQ ID NO: 17168 - DNA, 20 bp, synthetic construct
  source 1..20: mol_type = other DNA
ttcaccttgccccacagggc

SEQ ID NO: 17169 - DNA, 20 bp, synthetic construct
  source 1..20: mol_type = other DNA
ttcaccttgccccacagggc

SEQ ID NO: 17170 - DNA, 20 bp, synthetic construct
  source 1..20: mol_type = other DNA
ttcaccttgccccacagggc

SEQ ID NO: 17171 - DNA, 21 bp, synthetic construct
  source 1..21: mol_type = other DNA
tagcaacctcaaacagacacc

SEQ ID NO: 17172 - DNA, 21 bp, synthetic construct
  source 1..21: mol_type = other DNA
tagcaacctcaaacagacacc

SEQ ID NO: 17173 - DNA, 20 bp, synthetic construct
  source 1..20: mol_type = other DNA
ttcaccttgccccacagggc

SEQ ID NO: 17174 - DNA, 21 bp, synthetic construct
  source 1..21: mol_type = other DNA
ctagcaacctcaaacagacac

SEQ ID NO: 17175 - DNA, 21 bp, synthetic construct
  source 1..21: mol_type = other DNA
ctagcaacctcaaacagacac

SEQ ID NO: 17176 - DNA, 20 bp, synthetic construct
  source 1..20: mol_type = other DNA
gttcaccttgccccacaggg

SEQ ID NO: 17177 - DNA, 20 bp, synthetic construct
  source 1..20: mol_type = other DNA
gttcaccttgccccacaggg

SEQ ID NO: 17178 - DNA, 20 bp, synthetic construct
  source 1..20: mol_type = other DNA
gttcaccttgccccacaggg

SEQ ID NO: 17179 - DNA, 20 bp, synthetic construct
  source 1..20: mol_type = other DNA
gttcaccttgccccacaggg

SEQ ID NO: 17180 - DNA, 20 bp, synthetic construct
  source 1..20: mol_type = other DNA
tagcaacctcaaacagacac

SEQ ID NO: 17181 - DNA, 22 bp, synthetic construct
  source 1..22: mol_type = other DNA
acgttcaccttgccccacaggg

SEQ ID NO: 17182 - DNA, 20 bp, synthetic construct
  source 1..20: mol_type = other DNA
gttcaccttgccccacaggg

SEQ ID NO: 17183 - DNA, 21 bp, synthetic construct
  source 1..21: mol_type = other DNA
acgttcaccttgccccacagg

SEQ ID NO: 17184 - DNA, 20 bp, synthetic construct
  source 1..20: mol_type = other DNA
cgttcaccttgccccacagg

SEQ ID NO: 17185 - DNA, 20 bp, synthetic construct
  source 1..20: mol_type = other DNA
ctagcaacctcaaacagaca

SEQ ID NO: 17186 - DNA, 21 bp, synthetic construct
  source 1..21: mol_type = other DNA
cacgttcaccttgccccacag

SEQ ID NO: 17187 - DNA, 21 bp, synthetic construct
  source 1..21: mol_type = other DNA
cacgttcaccttgccccacag

SEQ ID NO: 17188 - DNA, 21 bp, synthetic construct
  source 1..21: mol_type = other DNA
cacgttcaccttgccccacag

SEQ ID NO: 17189 - DNA, 21 bp, synthetic construct
  source 1..21: mol_type = other DNA
cacgttcaccttgccccacag

SEQ ID NO: 17190 - DNA, 20 bp, synthetic construct
  source 1..20: mol_type = other DNA
acgttcaccttgccccacag

SEQ ID NO: 17191 - DNA, 20 bp, synthetic construct
  source 1..20: mol_type = other DNA
acgttcaccttgccccacag

SEQ ID NO: 17192 - DNA, 20 bp, synthetic construct
  source 1..20: mol_type = other DNA
acgttcaccttgccccacag

SEQ ID NO: 17193 - DNA, 20 bp, synthetic construct
  source 1..20: mol_type = other DNA
acgttcaccttgccccacag

SEQ ID NO: 17194 - DNA, 20 bp, synthetic construct
  source 1..20: mol_type = other DNA
acgttcaccttgccccacag

SEQ ID NO: 17195 - DNA, 20 bp, synthetic construct
  source 1..20: mol_type = other DNA
actagcaacctcaaacagac

SEQ ID NO: 17196 - DNA, 20 bp, synthetic construct
  source 1..20: mol_type = other DNA
acgttcaccttgccccacag

SEQ ID NO: 17197 - DNA, 20 bp, synthetic construct
  source 1..20: mol_type = other DNA
cacgttcaccttgccccaca

SEQ ID NO: 17198 - DNA, 20 bp, synthetic construct
  source 1..20: mol_type = other DNA
cacgttcaccttgccccaca

SEQ ID NO: 17199 - DNA, 20 bp, synthetic construct
  source 1..20: mol_type = other DNA
cacgttcaccttgccccaca

SEQ ID NO: 17200 - DNA, 20 bp, synthetic construct
  source 1..20: mol_type = other DNA
cacgttcaccttgccccaca

SEQ ID NO: 17201 - DNA, 20 bp, synthetic construct
  source 1..20: mol_type = other DNA
cacgttcaccttgccccaca

SEQ ID NO: 17202 - DNA, 20 bp, synthetic construct
  source 1..20: mol_type = other DNA
cacgttcaccttgccccaca

SEQ ID NO: 17203 - DNA, 20 bp, synthetic construct
  source 1..20: mol_type = other DNA
cacgttcaccttgccccaca

SEQ ID NO: 17204 - DNA, 20 bp, synthetic construct
  source 1..20: mol_type = other DNA
cacgttcaccttgccccaca

SEQ ID NO: 17205 - DNA, 20 bp, synthetic construct
  source 1..20: mol_type = other DNA
cacgttcaccttgccccaca

SEQ ID NO: 17206 - DNA, 20 bp, synthetic construct
  source 1..20: mol_type = other DNA
cacgttcaccttgccccaca

SEQ ID NO: 17207 - DNA, 20 bp, synthetic construct
  source 1..20: mol_type = other DNA
cactagcaacctcaaacaga

SEQ ID NO: 17208 - DNA, 20 bp, synthetic construct
  source 1..20: mol_type = other DNA
cacgttcaccttgccccaca

SEQ ID NO: 17209 - DNA, 20 bp, synthetic construct
  source 1..20: mol_type = other DNA
cactagcaacctcaaacaga

SEQ ID NO: 17210 - DNA, 21 bp, synthetic construct
  source 1..21: mol_type = other DNA
tccacgttcaccttgccccac

SEQ ID NO: 17211 - DNA, 21 bp, synthetic construct
  source 1..21: mol_type = other DNA
tccacgttcaccttgccccac

SEQ ID NO: 17212 - DNA, 20 bp, synthetic construct
  source 1..20: mol_type = other DNA
ccacgttcaccttgccccac

SEQ ID NO: 17213 - DNA, 20 bp, synthetic construct
  source 1..20: mol_type = other DNA
ccacgttcaccttgccccac

SEQ ID NO: 17214 - DNA, 20 bp, synthetic construct
  source 1..20: mol_type = other DNA
ccacgttcaccttgccccac

SEQ ID NO: 17215 - DNA, 20 bp, synthetic construct
  source 1..20: mol_type = other DNA
ccacgttcaccttgccccac

SEQ ID NO: 17216 - DNA, 20 bp, synthetic construct
  source 1..20: mol_type = other DNA
ccacgttcaccttgccccac

SEQ ID NO: 17217 - DNA, 20 bp, synthetic construct
  source 1..20: mol_type = other DNA
ccacgttcaccttgccccac

SEQ ID NO: 17218 - DNA, 20 bp, synthetic construct
  source 1..20: mol_type = other DNA
ccacgttcaccttgccccac

SEQ ID NO: 17219 - DNA, 20 bp, synthetic construct
  source 1..20: mol_type = other DNA
ccacgttcaccttgccccac

SEQ ID NO: 17220 - DNA, 20 bp, synthetic construct
  source 1..20: mol_type = other DNA
ccacgttcaccttgccccac

SEQ ID NO: 17221 - DNA, 20 bp, synthetic construct
  source 1..20: mol_type = other DNA
ccacgttcaccttgccccac

SEQ ID NO: 17222 - DNA, 20 bp, synthetic construct
  source 1..20: mol_type = other DNA
tcactagcaacctcaaacag

SEQ ID NO: 17223 - DNA, 23 bp, synthetic construct
  source 1..23: mol_type = other DNA
catccacgttcaccttgccccac

SEQ ID NO: 17224 - DNA, 23 bp, synthetic construct
  source 1..23: mol_type = other DNA
tgttcactagcaacctcaaacag

SEQ ID NO: 17225 - DNA, 23 bp, synthetic construct
  source 1..23: mol_type = other DNA
catccacgttcaccttgccccac

SEQ ID NO: 17226 - DNA, 23 bp, synthetic construct
  source 1..23: mol_type = other DNA
tgttcactagcaacctcaaacag

SEQ ID NO: 17227 - DNA, 22 bp, synthetic construct
  source 1..22: mol_type = other DNA
gttcactagcaacctcaaacag

SEQ ID NO: 17228 - DNA, 24 bp, synthetic construct
  source 1..24: mol_type = other DNA
tgtgttcactagcaacctcaaaca

SEQ ID NO: 17229 - DNA, 23 bp, synthetic construct
  source 1..23: mol_type = other DNA
tcatccacgttcaccttgcccca

SEQ ID NO: 17230 - DNA, 21 bp, synthetic construct
  source 1..21: mol_type = other DNA
atccacgttcaccttgcccca

SEQ ID NO: 17231 - DNA, 21 bp, synthetic construct
  source 1..21: mol_type = other DNA
atccacgttcaccttgcccca

SEQ ID NO: 17232 - DNA, 21 bp, synthetic construct
  source 1..21: mol_type = other DNA
atccacgttcaccttgcccca

SEQ ID NO: 17233 - DNA, 20 bp, synthetic construct
  source 1..20: mol_type = other DNA
tccacgttcaccttgcccca

SEQ ID NO: 17234 - DNA, 20 bp, synthetic construct
  source 1..20: mol_type = other DNA
tccacgttcaccttgcccca

SEQ ID NO: 17235 - DNA, 20 bp, synthetic construct
  source 1..20: mol_type = other DNA
tccacgttcaccttgcccca

SEQ ID NO: 17236 - DNA, 20 bp, synthetic construct
  source 1..20: mol_type = other DNA
tccacgttcaccttgcccca

SEQ ID NO: 17237 - DNA, 20 bp, synthetic construct
  source 1..20: mol_type = other DNA
ttcactagcaacctcaaaca

SEQ ID NO: 17238 - DNA, 23 bp, synthetic construct
  source 1..23: mol_type = other DNA
gtgttcactagcaacctcaaaca

SEQ ID NO: 17239 - DNA, 23 bp, synthetic construct
  source 1..23: mol_type = other DNA
gtgttcactagcaacctcaaaca

SEQ ID NO: 17240 - DNA, 21 bp, synthetic construct
  source 1..21: mol_type = other DNA
atccacgttcaccttgcccca

SEQ ID NO: 17241 - DNA, 21 bp, synthetic construct
  source 1..21: mol_type = other DNA
atccacgttcaccttgcccca

SEQ ID NO: 17242 - DNA, 20 bp, synthetic construct
  source 1..20: mol_type = other DNA
ttcactagcaacctcaaaca

SEQ ID NO: 17243 - DNA, 21 bp, synthetic construct
  source 1..21: mol_type = other DNA
catccacgttcaccttgcccc

SEQ ID NO: 17244 - DNA, 21 bp, synthetic construct
  source 1..21: mol_type = other DNA
catccacgttcaccttgcccc

SEQ ID NO: 17245 - DNA, 20 bp, synthetic construct
  source 1..20: mol_type = other DNA
gttcactagcaacctcaaac

SEQ ID NO: 17246 - DNA, 20 bp, synthetic construct
  source 1..20: mol_type = other DNA
gttcactagcaacctcaaac

SEQ ID NO: 17247 - DNA, 20 bp, synthetic construct
  source 1..20: mol_type = other DNA
gttcactagcaacctcaaac

SEQ ID NO: 17248 - DNA, 20 bp, synthetic construct
  source 1..20: mol_type = other DNA
gttcactagcaacctcaaac

SEQ ID NO: 17249 - DNA, 20 bp, synthetic construct
  source 1..20: mol_type = other DNA
gttcactagcaacctcaaac

SEQ ID NO: 17250 - DNA, 20 bp, synthetic construct
  source 1..20: mol_type = other DNA
atccacgttcaccttgcccc

SEQ ID NO: 17251 - DNA, 21 bp, synthetic construct
  source 1..21: mol_type = other DNA
catccacgttcaccttgcccc

SEQ ID NO: 17252 - DNA, 21 bp, synthetic construct
  source 1..21: mol_type = other DNA
catccacgttcaccttgcccc

SEQ ID NO: 17253 - DNA, 22 bp, synthetic construct
  source 1..22: mol_type = other DNA
gtgttcactagcaacctcaaac

SEQ ID NO: 17254 - DNA, 20 bp, synthetic construct
  source 1..20: mol_type = other DNA
gttcactagcaacctcaaac

SEQ ID NO: 17255 - DNA, 20 bp, synthetic construct
  source 1..20: mol_type = other DNA
gttcactagcaacctcaaac

SEQ ID NO: 17256 - DNA, 21 bp, synthetic construct
  source 1..21: mol_type = other DNA
tcatccacgttcaccttgccc

SEQ ID NO: 17257 - DNA, 20 bp, synthetic construct
  source 1..20: mol_type = other DNA
tgttcactagcaacctcaaa

SEQ ID NO: 17258 - DNA, 20 bp, synthetic construct
  source 1..20: mol_type = other DNA
tgttcactagcaacctcaaa

SEQ ID NO: 17259 - DNA, 20 bp, synthetic construct
  source 1..20: mol_type = other DNA
tgttcactagcaacctcaaa

SEQ ID NO: 17260 - DNA, 20 bp, synthetic construct
  source 1..20: mol_type = other DNA
tgttcactagcaacctcaaa

SEQ ID NO: 17261 - DNA, 20 bp, synthetic construct
  source 1..20: mol_type = other DNA
catccacgttcaccttgccc

SEQ ID NO: 17262 - DNA, 23 bp, synthetic construct
  source 1..23: mol_type = other DNA
ctgtgttcactagcaacctcaaa

SEQ ID NO: 17263 - DNA, 21 bp, synthetic construct
  source 1..21: mol_type = other DNA
tcatccacgttcaccttgccc

SEQ ID NO: 17264 - DNA, 21 bp, synthetic construct
  source 1..21: mol_type = other DNA
tcatccacgttcaccttgccc

SEQ ID NO: 17265 - DNA, 22 bp, synthetic construct
  source 1..22: mol_type = other DNA
tgtgttcactagcaacctcaaa

SEQ ID NO: 17266 - DNA, 20 bp, synthetic construct
  source 1..20: mol_type = other DNA
tgttcactagcaacctcaaa

SEQ ID NO: 17267 - DNA, 20 bp, synthetic construct
  source 1..20: mol_type = other DNA
catccacgttcaccttgccc

SEQ ID NO: 17268 - DNA, 21 bp, synthetic construct
  source 1..21: mol_type = other DNA
tgtgttcactagcaacctcaa

SEQ ID NO: 17269 - DNA, 21 bp, synthetic construct
  source 1..21: mol_type = other DNA
tgtgttcactagcaacctcaa

SEQ ID NO: 17270 - DNA, 20 bp, synthetic construct
  source 1..20: mol_type = other DNA
tcatccacgttcaccttgcc

SEQ ID NO: 17271 - DNA, 20 bp, synthetic construct
  source 1..20: mol_type = other DNA
gtgttcactagcaacctcaa

SEQ ID NO: 17272 - DNA, 21 bp, synthetic construct
  source 1..21: mol_type = other DNA
tgtgttcactagcaacctcaa

SEQ ID NO: 17273 - DNA, 21 bp, synthetic construct
  source 1..21: mol_type = other DNA
tgtgttcactagcaacctcaa

SEQ ID NO: 17274 - DNA, 23 bp, synthetic construct
  source 1..23: mol_type = other DNA
actgtgttcactagcaacctcaa

SEQ ID NO: 17275 - DNA, 21 bp, synthetic construct
  source 1..21: mol_type = other DNA
ctgtgttcactagcaacctca

SEQ ID NO: 17276 - DNA, 20 bp, synthetic construct
  source 1..20: mol_type = other DNA
tgtgttcactagcaacctca

SEQ ID NO: 17277 - DNA, 20 bp, synthetic construct
  source 1..20: mol_type = other DNA
ttcatccacgttcaccttgc

SEQ ID NO: 17278 - DNA, 23 bp, synthetic construct
  source 1..23: mol_type = other DNA
aacttcatccacgttcaccttgc

SEQ ID NO: 17279 - DNA, 23 bp, synthetic construct
  source 1..23: mol_type = other DNA
aacttcatccacgttcaccttgc

SEQ ID NO: 17280 - DNA, 21 bp, synthetic construct
  source 1..21: mol_type = other DNA
ctgtgttcactagcaacctca

SEQ ID NO: 17281 - DNA, 21 bp, synthetic construct
  source 1..21: mol_type = other DNA
ctgtgttcactagcaacctca

SEQ ID NO: 17282 - DNA, 24 bp, synthetic construct
  source 1..24: mol_type = other DNA
caactgtgttcactagcaacctca

SEQ ID NO: 17283 - DNA, 20 bp, synthetic construct
  source 1..20: mol_type = other DNA
tgtgttcactagcaacctca

SEQ ID NO: 17284 - DNA, 20 bp, synthetic construct
  source 1..20: mol_type = other DNA
ctgtgttcactagcaacctc

SEQ ID NO: 17285 - DNA, 20 bp, synthetic construct
  source 1..20: mol_type = other DNA
cttcatccacgttcaccttg

SEQ ID NO: 17286 - DNA, 20 bp, synthetic construct
  source 1..20: mol_type = other DNA
ctgtgttcactagcaacctc

SEQ ID NO: 17287 - DNA, 21 bp, synthetic construct
  source 1..21: mol_type = other DNA
actgtgttcactagcaacctc

SEQ ID NO: 17288 - DNA, 20 bp, synthetic construct
  source 1..20: mol_type = other DNA
actgtgttcactagcaacct

SEQ ID NO: 17289 - DNA, 20 bp, synthetic construct
  source 1..20: mol_type = other DNA
acttcatccacgttcacctt

SEQ ID NO: 17290 - DNA, 23 bp, synthetic construct
  source 1..23: mol_type = other DNA
acaactgtgttcactagcaacct

SEQ ID NO: 17291 - DNA, 23 bp, synthetic construct
  source 1..23: mol_type = other DNA
ccaacttcatccacgttcacctt

SEQ ID NO: 17292 - DNA, 23 bp, synthetic construct
  source 1..23: mol_type = other DNA
acaactgtgttcactagcaacct

SEQ ID NO: 17293 - DNA, 20 bp, synthetic construct
  source 1..20: mol_type = other DNA
actgtgttcactagcaacct

SEQ ID NO: 17294 - DNA, 21 bp, synthetic construct
  source 1..21: mol_type = other DNA
aactgtgttcactagcaacct

SEQ ID NO: 17295 - DNA, 24 bp, synthetic construct
  source 1..24: mol_type = other DNA
caccaacttcatccacgttcacct

SEQ ID NO: 17296 - DNA, 21 bp, synthetic construct
  source 1..21: mol_type = other DNA
caactgtgttcactagcaacc

SEQ ID NO: 17297 - DNA, 20 bp, synthetic construct
  source 1..20: mol_type = other DNA
aacttcatccacgttcacct

SEQ ID NO: 17298 - DNA, 20 bp, synthetic construct
  source 1..20: mol_type = other DNA
aacttcatccacgttcacct

SEQ ID NO: 17299 - DNA, 20 bp, synthetic construct
  source 1..20: mol_type = other DNA
aacttcatccacgttcacct

SEQ ID NO: 17300 - DNA, 20 bp, synthetic construct
  source 1..20: mol_type = other DNA
aacttcatccacgttcacct

SEQ ID NO: 17301 - DNA, 20 bp, synthetic construct
  source 1..20: mol_type = other DNA
aacttcatccacgttcacct

SEQ ID NO: 17302 - DNA, 20 bp, synthetic construct
  source 1..20: mol_type = other DNA
aactgtgttcactagcaacc

SEQ ID NO: 17303 - DNA, 23 bp, synthetic construct
  source 1..23: mol_type = other DNA
accaacttcatccacgttcacct

SEQ ID NO: 17304 - DNA, 21 bp, synthetic construct
  source 1..21: mol_type = other DNA
caactgtgttcactagcaacc

SEQ ID NO: 17305 - DNA, 21 bp, synthetic construct
  source 1..21: mol_type = other DNA
caactgtgttcactagcaacc

SEQ ID NO: 17306 - DNA, 20 bp, synthetic construct
  source 1..20: mol_type = other DNA
aacttcatccacgttcacct

SEQ ID NO: 17307 - DNA, 24 bp, synthetic construct
  source 1..24: mol_type = other DNA
ccaccaacttcatccacgttcacc

SEQ ID NO: 17308 - DNA, 21 bp, synthetic construct
  source 1..21: mol_type = other DNA
acaactgtgttcactagcaac

SEQ ID NO: 17309 - DNA, 20 bp, synthetic construct
  source 1..20: mol_type = other DNA
caacttcatccacgttcacc

SEQ ID NO: 17310 - DNA, 20 bp, synthetic construct
  source 1..20: mol_type = other DNA
caacttcatccacgttcacc

SEQ ID NO: 17311 - DNA, 20 bp, synthetic construct
  source 1..20: mol_type = other DNA
caacttcatccacgttcacc

SEQ ID NO: 17312 - DNA, 20 bp, synthetic construct
  source 1..20: mol_type = other DNA
caacttcatccacgttcacc

SEQ ID NO: 17313 - DNA, 20 bp, synthetic construct
  source 1..20: mol_type = other DNA
caactgtgttcactagcaac

SEQ ID NO: 17314 - DNA, 23 bp, synthetic construct
  source 1..23: mol_type = other DNA
caccaacttcatccacgttcacc

SEQ ID NO: 17315 - DNA, 21 bp, synthetic construct
  source 1..21: mol_type = other DNA
acaactgtgttcactagcaac

SEQ ID NO: 17316 - DNA, 21 bp, synthetic construct
  source 1..21: mol_type = other DNA
acaactgtgttcactagcaac

SEQ ID NO: 17317 - DNA, 22 bp, synthetic construct
  source 1..22: mol_type = other DNA
accaacttcatccacgttcacc

SEQ ID NO: 17318 - DNA, 24 bp, synthetic construct
  source 1..24: mol_type = other DNA
accaccaacttcatccacgttcac

SEQ ID NO: 17319 - DNA, 20 bp, synthetic construct
  source 1..20: mol_type = other DNA
ccaacttcatccacgttcac

SEQ ID NO: 17320 - DNA, 20 bp, synthetic construct
  source 1..20: mol_type = other DNA
acaactgtgttcactagcaa

SEQ ID NO: 17321 - DNA, 23 bp, synthetic construct
  source 1..23: mol_type = other DNA
ccaccaacttcatccacgttcac

SEQ ID NO: 17322 - DNA, 20 bp, synthetic construct
  source 1..20: mol_type = other DNA
accaacttcatccacgttca

SEQ ID NO: 17323 - DNA, 20 bp, synthetic construct
  source 1..20: mol_type = other DNA
cacaactgtgttcactagca

SEQ ID NO: 17324 - DNA, 23 bp, synthetic construct
  source 1..23: mol_type = other DNA
tgacacaactgtgttcactagca

SEQ ID NO: 17325 - DNA, 23 bp, synthetic construct
  source 1..23: mol_type = other DNA
tgacacaactgtgttcactagca

SEQ ID NO: 17326 - DNA, 23 bp, synthetic construct
  source 1..23: mol_type = other DNA
tgacacaactgtgttcactagca

SEQ ID NO: 17327 - DNA, 23 bp, synthetic construct
  source 1..23: mol_type = other DNA
tgacacaactgtgttcactagca

SEQ ID NO: 17328 - DNA, 20 bp, synthetic construct
  source 1..20: mol_type = other DNA
acacaactgtgttcactagc

SEQ ID NO: 17329 - DNA, 20 bp, synthetic construct
  source 1..20: mol_type = other DNA
caccaacttcatccacgttc

SEQ ID NO: 17330 - DNA, 20 bp, synthetic construct
  source 1..20: mol_type = other DNA
acacaactgtgttcactagc

SEQ ID NO: 17331 - DNA, 20 bp, synthetic construct
  source 1..20: mol_type = other DNA
ccaccaacttcatccacgtt

SEQ ID NO: 17332 - DNA, 20 bp, synthetic construct
  source 1..20: mol_type = other DNA
gacacaactgtgttcactag

SEQ ID NO: 17333 - DNA, 23 bp, synthetic construct
  source 1..23: mol_type = other DNA
tctgacacaactgtgttcactag

SEQ ID NO: 17334 - DNA, 22 bp, synthetic construct
  source 1..22: mol_type = other DNA
ctgacacaactgtgttcactag

SEQ ID NO: 17335 - DNA, 20 bp, synthetic construct
  source 1..20: mol_type = other DNA
gacacaactgtgttcactag

SEQ ID NO: 17336 - DNA, 21 bp, synthetic construct
  source 1..21: mol_type = other DNA
tgacacaactgtgttcactag

SEQ ID NO: 17337 - DNA, 20 bp, synthetic construct
  source 1..20: mol_type = other DNA
ccaccaacttcatccacgtt

SEQ ID NO: 17338 - DNA, 24 bp, synthetic construct
  source 1..24: mol_type = other DNA
cttctgacacaactgtgttcacta

SEQ ID NO: 17339 - DNA, 20 bp, synthetic construct
  source 1..20: mol_type = other DNA
accaccaacttcatccacgt

SEQ ID NO: 17340 - DNA, 20 bp, synthetic construct
  source 1..20: mol_type = other DNA
tgacacaactgtgttcacta

SEQ ID NO: 17341 - DNA, 23 bp, synthetic construct
  source 1..23: mol_type = other DNA
ctcaccaccaacttcatccacgt

SEQ ID NO: 17342 - DNA, 23 bp, synthetic construct
  source 1..23: mol_type = other DNA
ctcaccaccaacttcatccacgt

SEQ ID NO: 17343 - DNA, 23 bp, synthetic construct
  source 1..23: mol_type = other DNA
ttctgacacaactgtgttcacta

SEQ ID NO: 17344 - DNA, 22 bp, synthetic construct
  source 1..22: mol_type = other DNA
tcaccaccaacttcatccacgt

SEQ ID NO: 17345 - DNA, 22 bp, synthetic construct
  source 1..22: mol_type = other DNA
tctgacacaactgtgttcacta

SEQ ID NO: 17346 - DNA, 24 bp, synthetic construct
  source 1..24: mol_type = other DNA
gcctcaccaccaacttcatccacg

SEQ ID NO: 17347 - DNA, 21 bp, synthetic construct
  source 1..21: mol_type = other DNA
tctgacacaactgtgttcact

SEQ ID NO: 17348 - DNA, 20 bp, synthetic construct
  source 1..20: mol_type = other DNA
ctgacacaactgtgttcact

SEQ ID NO: 17349 - DNA, 20 bp, synthetic construct
  source 1..20: mol_type = other DNA
ctgacacaactgtgttcact

SEQ ID NO: 17350 - DNA, 20 bp, synthetic construct
  source 1..20: mol_type = other DNA
ctgacacaactgtgttcact

SEQ ID NO: 17351 - DNA, 20 bp, synthetic construct
  source 1..20: mol_type = other DNA
ctgacacaactgtgttcact

SEQ ID NO: 17352 - DNA, 20 bp, synthetic construct
  source 1..20: mol_type = other DNA
ctgacacaactgtgttcact

SEQ ID NO: 17353 - DNA, 20 bp, synthetic construct
  source 1..20: mol_type = other DNA
caccaccaacttcatccacg

SEQ ID NO: 17354 - DNA, 23 bp, synthetic construct
  source 1..23: mol_type = other DNA
cctcaccaccaacttcatccacg

SEQ ID NO: 17355 - DNA, 23 bp, synthetic construct
  source 1..23: mol_type = other DNA
cctcaccaccaacttcatccacg

SEQ ID NO: 17356 - DNA, 21 bp, synthetic construct
  source 1..21: mol_type = other DNA
tctgacacaactgtgttcact

SEQ ID NO: 17357 - DNA, 21 bp, synthetic construct
  source 1..21: mol_type = other DNA
tctgacacaactgtgttcact

SEQ ID NO: 17358 - DNA, 20 bp, synthetic construct
  source 1..20: mol_type = other DNA
ctgacacaactgtgttcact

SEQ ID NO: 17359 - DNA, 20 bp, synthetic construct
  source 1..20: mol_type = other DNA
tctgacacaactgtgttcac

SEQ ID NO: 17360 - DNA, 20 bp, synthetic construct
  source 1..20: mol_type = other DNA
tctgacacaactgtgttcac

SEQ ID NO: 17361 - DNA, 20 bp, synthetic construct
  source 1..20: mol_type = other DNA
tctgacacaactgtgttcac

SEQ ID NO: 17362 - DNA, 20 bp, synthetic construct
  source 1..20: mol_type = other DNA
tctgacacaactgtgttcac

SEQ ID NO: 17363 - DNA, 20 bp, synthetic construct
  source 1..20: mol_type = other DNA
tcaccaccaacttcatccac

SEQ ID NO: 17364 - DNA, 22 bp, synthetic construct
  source 1..22: mol_type = other DNA
cttctgacacaactgtgttcac

SEQ ID NO: 17365 - DNA, 20 bp, synthetic construct
  source 1..20: mol_type = other DNA
tctgacacaactgtgttcac

SEQ ID NO: 17366 - DNA, 20 bp, synthetic construct
  source 1..20: mol_type = other DNA
tctgacacaactgtgttcac

SEQ ID NO: 17367 - DNA, 21 bp, synthetic construct
  source 1..21: mol_type = other DNA
cttctgacacaactgtgttca

SEQ ID NO: 17368 - DNA, 20 bp, synthetic construct
  source 1..20: mol_type = other DNA
ctcaccaccaacttcatcca

SEQ ID NO: 17369 - DNA, 20 bp, synthetic construct
  source 1..20: mol_type = other DNA
ctcaccaccaacttcatcca

SEQ ID NO: 17370 - DNA, 20 bp, synthetic construct
  source 1..20: mol_type = other DNA
ctcaccaccaacttcatcca

SEQ ID NO: 17371 - DNA, 20 bp, synthetic construct
  source 1..20: mol_type = other DNA
ctcaccaccaacttcatcca

SEQ ID NO: 17372 - DNA, 20 bp, synthetic construct
  source 1..20: mol_type = other DNA
ctcaccaccaacttcatcca

SEQ ID NO: 17373 - DNA, 20 bp, synthetic construct
  source 1..20: mol_type = other DNA
ttctgacacaactgtgttca

SEQ ID NO: 17374 - DNA, 23 bp, synthetic construct
  source 1..23: mol_type = other DNA
ggcctcaccaccaacttcatcca

SEQ ID NO: 17375 - DNA, 23 bp, synthetic construct
  source 1..23: mol_type = other DNA
tgcttctgacacaactgtgttca

SEQ ID NO: 17376 - DNA, 20 bp, synthetic construct
  source 1..20: mol_type = other DNA
ctcaccaccaacttcatcca

SEQ ID NO: 17377 - DNA, 21 bp, synthetic construct
  source 1..21: mol_type = other DNA
gcttctgacacaactgtgttc

SEQ ID NO: 17378 - DNA, 20 bp, synthetic construct
  source 1..20: mol_type = other DNA
cctcaccaccaacttcatcc

SEQ ID NO: 17379 - DNA, 20 bp, synthetic construct
  source 1..20: mol_type = other DNA
cctcaccaccaacttcatcc

SEQ ID NO: 17380 - DNA, 20 bp, synthetic construct
  source 1..20: mol_type = other DNA
cctcaccaccaacttcatcc

SEQ ID NO: 17381 - DNA, 20 bp, synthetic construct
  source 1..20: mol_type = other DNA
cctcaccaccaacttcatcc

SEQ ID NO: 17382 - DNA, 20 bp, synthetic construct
  source 1..20: mol_type = other DNA
cttctgacacaactgtgttc

SEQ ID NO: 17383 - DNA, 20 bp, synthetic construct
  source 1..20: mol_type = other DNA
gcctcaccaccaacttcatc

SEQ ID NO: 17384 - DNA, 20 bp, synthetic construct
  source 1..20: mol_type = other DNA
gcttctgacacaactgtgtt

SEQ ID NO: 17385 - DNA, 21 bp, synthetic construct
  source 1..21: mol_type = other DNA
ggcctcaccaccaacttcatc

SEQ ID NO: 17386 - DNA, 21 bp, synthetic construct
  source 1..21: mol_type = other DNA
ggcctcaccaccaacttcatc

SEQ ID NO: 17387 - DNA, 20 bp, synthetic construct
  source 1..20: mol_type = other DNA
gcttctgacacaactgtgtt

SEQ ID NO: 17388 - DNA, 24 bp, synthetic construct
  source 1..24: mol_type = other DNA
ccagggcctcaccaccaacttcat

SEQ ID NO: 17389 - DNA, 20 bp, synthetic construct
  source 1..20: mol_type = other DNA
ggcctcaccaccaacttcat

SEQ ID NO: 17390 - DNA, 20 bp, synthetic construct
  source 1..20: mol_type = other DNA
tgcttctgacacaactgtgt

SEQ ID NO: 17391 - DNA, 20 bp, synthetic construct
  source 1..20: mol_type = other DNA
gggcctcaccaccaacttca

SEQ ID NO: 17392 - DNA, 20 bp, synthetic construct
  source 1..20: mol_type = other DNA
ttgcttctgacacaactgtg

SEQ ID NO: 17393 - DNA, 23 bp, synthetic construct
  source 1..23: mol_type = other DNA
ccagggcctcaccaccaacttca

SEQ ID NO: 17394 - DNA, 23 bp, synthetic construct
  source 1..23: mol_type = other DNA
catttgcttctgacacaactgtg

SEQ ID NO: 17395 - DNA, 23 bp, synthetic construct
  source 1..23: mol_type = other DNA
ccagggcctcaccaccaacttca

SEQ ID NO: 17396 - DNA, 23 bp, synthetic construct
  source 1..23: mol_type = other DNA
catttgcttctgacacaactgtg

SEQ ID NO: 17397 - DNA, 21 bp, synthetic construct
  source 1..21: mol_type = other DNA
tttgcttctgacacaactgtg

SEQ ID NO: 17398 - DNA, 21 bp, synthetic construct
  source 1..21: mol_type = other DNA
tttgcttctgacacaactgtg

SEQ ID NO: 17399 - DNA, 20 bp, synthetic construct
  source 1..20: mol_type = other DNA
agggcctcaccaccaacttc

SEQ ID NO: 17400 - DNA, 20 bp, synthetic construct
  source 1..20: mol_type = other DNA
tttgcttctgacacaactgt

SEQ ID NO: 17401 - DNA, 20 bp, synthetic construct
  source 1..20: mol_type = other DNA
atttgcttctgacacaactg

SEQ ID NO: 17402 - DNA, 20 bp, synthetic construct
  source 1..20: mol_type = other DNA
atttgcttctgacacaactg

SEQ ID NO: 17403 - DNA, 20 bp, synthetic construct
  source 1..20: mol_type = other DNA
atttgcttctgacacaactg

SEQ ID NO: 17404 - DNA, 20 bp, synthetic construct
  source 1..20: mol_type = other DNA
cagggcctcaccaccaactt

SEQ ID NO: 17405 - DNA, 20 bp, synthetic construct
  source 1..20: mol_type = other DNA
atttgcttctgacacaactg

SEQ ID NO: 17406 - DNA, 20 bp, synthetic construct
  source 1..20: mol_type = other DNA
atttgcttctgacacaactg

SEQ ID NO: 17407 - DNA, 23 bp, synthetic construct
  source 1..23: mol_type = other DNA
gcccagggcctcaccaccaactt

SEQ ID NO: 17408 - DNA, 23 bp, synthetic construct
  source 1..23: mol_type = other DNA
tacatttgcttctgacacaactg

SEQ ID NO: 17409 - DNA, 20 bp, synthetic construct
  source 1..20: mol_type = other DNA
cagggcctcaccaccaactt

SEQ ID NO: 17410 - DNA, 20 bp, synthetic construct
  source 1..20: mol_type = other DNA
atttgcttctgacacaactg

SEQ ID NO: 17411 - DNA, 24 bp, synthetic construct
  source 1..24: mol_type = other DNA
ctgcccagggcctcaccaccaact

SEQ ID NO: 17412 - DNA, 20 bp, synthetic construct
  source 1..20: mol_type = other DNA
catttgcttctgacacaact

SEQ ID NO: 17413 - DNA, 20 bp, synthetic construct
  source 1..20: mol_type = other DNA
catttgcttctgacacaact

SEQ ID NO: 17414 - DNA, 20 bp, synthetic construct
  source 1..20: mol_type = other DNA
catttgcttctgacacaact

SEQ ID NO: 17415 - DNA, 20 bp, synthetic construct
  source 1..20: mol_type = other DNA
catttgcttctgacacaact

SEQ ID NO: 17416 - DNA, 20 bp, synthetic construct
  source 1..20: mol_type = other DNA
ccagggcctcaccaccaact

SEQ ID NO: 17417 - DNA, 23 bp, synthetic construct
  source 1..23: mol_type = other DNA
tgcccagggcctcaccaccaact

SEQ ID NO: 17418 - DNA, 20 bp, synthetic construct
  source 1..20: mol_type = other DNA
acatttgcttctgacacaac

SEQ ID NO: 17419 - DNA, 20 bp, synthetic construct
  source 1..20: mol_type = other DNA
acatttgcttctgacacaac

SEQ ID NO: 17420 - DNA, 20 bp, synthetic construct
  source 1..20: mol_type = other DNA
acatttgcttctgacacaac

SEQ ID NO: 17421 - DNA, 20 bp, synthetic construct
  source 1..20: mol_type = other DNA
acatttgcttctgacacaac

SEQ ID NO: 17422 - DNA, 20 bp, synthetic construct
  source 1..20: mol_type = other DNA
acatttgcttctgacacaac

SEQ ID NO: 17423 - DNA, 20 bp, synthetic construct
  source 1..20: mol_type = other DNA
cccagggcctcaccaccaac

SEQ ID NO: 17424 - DNA, 24 bp, synthetic construct
  source 1..24: mol_type = other DNA
tgcttacatttgcttctgacacaa

SEQ ID NO: 17425 - DNA, 20 bp, synthetic construct
  source 1..20: mol_type = other DNA
tacatttgcttctgacacaa

SEQ ID NO: 17426 - DNA, 20 bp, synthetic construct
  source 1..20: mol_type = other DNA
tacatttgcttctgacacaa

SEQ ID NO: 17427 - DNA, 20 bp, synthetic construct
  source 1..20: mol_type = other DNA
tacatttgcttctgacacaa

SEQ ID NO: 17428 - DNA, 20 bp, synthetic construct
  source 1..20: mol_type = other DNA
tacatttgcttctgacacaa

SEQ ID NO: 17429 - DNA, 20 bp, synthetic construct
  source 1..20: mol_type = other DNA
gcccagggcctcaccaccaa

SEQ ID NO: 17430 - DNA, 20 bp, synthetic construct
  source 1..20: mol_type = other DNA
tgcccagggcctcaccacca

SEQ ID NO: 17431 - DNA, 20 bp, synthetic construct
  source 1..20: mol_type = other DNA
ttacatttgcttctgacaca

SEQ ID NO: 17432 - DNA, 23 bp, synthetic construct
  source 1..23: mol_type = other DNA
acctgcccagggcctcaccacca

SEQ ID NO: 17433 - DNA, 20 bp, synthetic construct
  source 1..20: mol_type = other DNA
ctgcccagggcctcaccacc

SEQ ID NO: 17434 - DNA, 20 bp, synthetic construct
  source 1..20: mol_type = other DNA
cttacatttgcttctgacac

SEQ ID NO: 17435 - DNA, 20 bp, synthetic construct
  source 1..20: mol_type = other DNA
ctgcccagggcctcaccacc

SEQ ID NO: 17436 - DNA, 20 bp, synthetic construct
  source 1..20: mol_type = other DNA
cttacatttgcttctgacac

SEQ ID NO: 17437 - DNA, 20 bp, synthetic construct
  source 1..20: mol_type = other DNA
cctgcccagggcctcaccac

SEQ ID NO: 17438 - DNA, 20 bp, synthetic construct
  source 1..20: mol_type = other DNA
gcttacatttgcttctgaca

SEQ ID NO: 17439 - DNA, 22 bp, synthetic construct
  source 1..22: mol_type = other DNA
aacctgcccagggcctcaccac

SEQ ID NO: 17440 - DNA, 20 bp, synthetic construct
  source 1..20: mol_type = other DNA
cctgcccagggcctcaccac

SEQ ID NO: 17441 - DNA, 21 bp, synthetic construct
  source 1..21: mol_type = other DNA
acctgcccagggcctcaccac

SEQ ID NO: 17442 - DNA, 20 bp, synthetic construct
  source 1..20: mol_type = other DNA
gcttacatttgcttctgaca

SEQ ID NO: 17443 - DNA, 21 bp, synthetic construct
  source 1..21: mol_type = other DNA
tgcttacatttgcttctgaca

SEQ ID NO: 17444 - DNA, 20 bp, synthetic construct
  source 1..20: mol_type = other DNA
acctgcccagggcctcacca

SEQ ID NO: 17445 - DNA, 20 bp, synthetic construct
  source 1..20: mol_type = other DNA
tgcttacatttgcttctgac

SEQ ID NO: 17446 - DNA, 23 bp, synthetic construct
  source 1..23: mol_type = other DNA
tattgcttacatttgcttctgac

SEQ ID NO: 17447 - DNA, 23 bp, synthetic construct
  source 1..23: mol_type = other DNA
ccaacctgcccagggcctcacca

SEQ ID NO: 17448 - DNA, 23 bp, synthetic construct
  source 1..23: mol_type = other DNA
tattgcttacatttgcttctgac

SEQ ID NO: 17449 - DNA, 21 bp, synthetic construct
  source 1..21: mol_type = other DNA
aacctgcccagggcctcacca

SEQ ID NO: 17450 - DNA, 21 bp, synthetic construct
  source 1..21: mol_type = other DNA
aacctgcccagggcctcacca

SEQ ID NO: 17451 - DNA, 21 bp, synthetic construct
  source 1..21: mol_type = other DNA
ttgcttacatttgcttctgac

SEQ ID NO: 17452 - DNA, 21 bp, synthetic construct
  source 1..21: mol_type = other DNA
ttgcttacatttgcttctgac

SEQ ID NO: 17453 - DNA, 22 bp, synthetic construct
  source 1..22: mol_type = other DNA
caacctgcccagggcctcacca

SEQ ID NO: 17454 - DNA, 21 bp, synthetic construct
  source 1..21: mol_type = other DNA
caacctgcccagggcctcacc

SEQ ID NO: 17455 - DNA, 21 bp, synthetic construct
  source 1..21: mol_type = other DNA
attgcttacatttgcttctga

SEQ ID NO: 17456 - DNA, 20 bp, synthetic construct
  source 1..20: mol_type = other DNA
ttgcttacatttgcttctga

SEQ ID NO: 17457 - DNA, 20 bp, synthetic construct
  source 1..20: mol_type = other DNA
aacctgcccagggcctcacc

SEQ ID NO: 17458 - DNA, 21 bp, synthetic construct
  source 1..21: mol_type = other DNA
caacctgcccagggcctcacc

SEQ ID NO: 17459 - DNA, 21 bp, synthetic construct
  source 1..21: mol_type = other DNA
caacctgcccagggcctcacc

SEQ ID NO: 17460 - DNA, 21 bp, synthetic construct
  source 1..21: mol_type = other DNA
attgcttacatttgcttctga

SEQ ID NO: 17461 - DNA, 21 bp, synthetic construct
  source 1..21: mol_type = other DNA
attgcttacatttgcttctga

SEQ ID NO: 17462 - DNA, 20 bp, synthetic construct
  source 1..20: mol_type = other DNA
ttgcttacatttgcttctga

SEQ ID NO: 17463 - DNA, 20 bp, synthetic construct
  source 1..20: mol_type = other DNA
caacctgcccagggcctcac

SEQ ID NO: 17464 - DNA, 20 bp, synthetic construct
  source 1..20: mol_type = other DNA
attgcttacatttgcttctg

SEQ ID NO: 17465 - DNA, 22 bp, synthetic construct
  source 1..22: mol_type = other DNA
ctattgcttacatttgcttctg

SEQ ID NO: 17466 - DNA, 20 bp, synthetic construct
  source 1..20: mol_type = other DNA
caacctgcccagggcctcac

SEQ ID NO: 17467 - DNA, 20 bp, synthetic construct
  source 1..20: mol_type = other DNA
attgcttacatttgcttctg

SEQ ID NO: 17468 - DNA, 20 bp, synthetic construct
  source 1..20: mol_type = other DNA
tattgcttacatttgcttct

SEQ ID NO: 17469 - DNA, 20 bp, synthetic construct
  source 1..20: mol_type = other DNA
ccaacctgcccagggcctca

SEQ ID NO: 17470 - DNA, 23 bp, synthetic construct
  source 1..23: mol_type = other DNA
ataccaacctgcccagggcctca

SEQ ID NO: 17471 - DNA, 23 bp, synthetic construct
  source 1..23: mol_type = other DNA
atctattgcttacatttgcttct

SEQ ID NO: 17472 - DNA, 20 bp, synthetic construct
  source 1..20: mol_type = other DNA
tattgcttacatttgcttct

SEQ ID NO: 17473 - DNA, 24 bp, synthetic construct
  source 1..24: mol_type = other DNA
tgataccaacctgcccagggcctc

SEQ ID NO: 17474 - DNA, 20 bp, synthetic construct
  source 1..20: mol_type = other DNA
ctattgcttacatttgcttc

SEQ ID NO: 17475 - DNA, 20 bp, synthetic construct
  source 1..20: mol_type = other DNA
ctattgcttacatttgcttc

SEQ ID NO: 17476 - DNA, 20 bp, synthetic construct
  source 1..20: mol_type = other DNA
ctattgcttacatttgcttc

SEQ ID NO: 17477 - DNA, 20 bp, synthetic construct
  source 1..20: mol_type = other DNA
ctattgcttacatttgcttc

SEQ ID NO: 17478 - DNA, 20 bp, synthetic construct
  source 1..20: mol_type = other DNA
ctattgcttacatttgcttc

SEQ ID NO: 17479 - DNA, 20 bp, synthetic construct
  source 1..20: mol_type = other DNA
accaacctgcccagggcctc

SEQ ID NO: 17480 - DNA, 23 bp, synthetic construct
  source 1..23: mol_type = other DNA
gataccaacctgcccagggcctc

SEQ ID NO: 17481 - DNA, 23 bp, synthetic construct
  source 1..23: mol_type = other DNA
gataccaacctgcccagggcctc

SEQ ID NO: 17482 - DNA, 23 bp, synthetic construct
  source 1..23: mol_type = other DNA
gataccaacctgcccagggcctc

SEQ ID NO: 17483 - DNA, 20 bp, synthetic construct
  source 1..20: mol_type = other DNA
ctattgcttacatttgcttc

SEQ ID NO: 17484 - DNA, 20 bp, synthetic construct
  source 1..20: mol_type = other DNA
ctattgcttacatttgcttc

SEQ ID NO: 17485 - DNA, 20 bp, synthetic construct
  source 1..20: mol_type = other DNA
tctattgcttacatttgctt

SEQ ID NO: 17486 - DNA, 20 bp, synthetic construct
  source 1..20: mol_type = other DNA
tctattgcttacatttgctt

SEQ ID NO: 17487 - DNA, 20 bp, synthetic construct
  source 1..20: mol_type = other DNA
tctattgcttacatttgctt

SEQ ID NO: 17488 - DNA, 20 bp, synthetic construct
  source 1..20: mol_type = other DNA
tctattgcttacatttgctt

SEQ ID NO: 17489 - DNA, 20 bp, synthetic construct
  source 1..20: mol_type = other DNA
taccaacctgcccagggcct

SEQ ID NO: 17490 - DNA, 23 bp, synthetic construct
  source 1..23: mol_type = other DNA
ccatctattgcttacatttgctt

SEQ ID NO: 17491 - DNA, 22 bp, synthetic construct
  source 1..22: mol_type = other DNA
catctattgcttacatttgctt

SEQ ID NO: 17492 - DNA, 20 bp, synthetic construct
  source 1..20: mol_type = other DNA
taccaacctgcccagggcct

SEQ ID NO: 17493 - DNA, 21 bp, synthetic construct
  source 1..21: mol_type = other DNA
catctattgcttacatttgct

SEQ ID NO: 17494 - DNA, 20 bp, synthetic construct
  source 1..20: mol_type = other DNA
ataccaacctgcccagggcc

SEQ ID NO: 17495 - DNA, 20 bp, synthetic construct
  source 1..20: mol_type = other DNA
atctattgcttacatttgct

SEQ ID NO: 17496 - DNA, 23 bp, synthetic construct
  source 1..23: mol_type = other DNA
ttgataccaacctgcccagggcc

SEQ ID NO: 17497 - DNA, 22 bp, synthetic construct
  source 1..22: mol_type = other DNA
tgataccaacctgcccagggcc

SEQ ID NO: 17498 - DNA, 23 bp, synthetic construct
  source 1..23: mol_type = other DNA
gccatctattgcttacatttgct

SEQ ID NO: 17499 - DNA, 24 bp, synthetic construct
  source 1..24: mol_type = other DNA
ccttgataccaacctgcccagggc

SEQ ID NO: 17500 - DNA, 20 bp, synthetic construct
  source 1..20: mol_type = other DNA
gataccaacctgcccagggc

SEQ ID NO: 17501 - DNA, 20 bp, synthetic construct
  source 1..20: mol_type = other DNA
catctattgcttacatttgc

SEQ ID NO: 17502 - DNA, 23 bp, synthetic construct
  source 1..23: mol_type = other DNA
cttgataccaacctgcccagggc

SEQ ID NO: 17503 - DNA, 24 bp, synthetic construct
  source 1..24: mol_type = other DNA
gagccatctattgcttacatttgc

SEQ ID NO: 17504 - DNA, 20 bp, synthetic construct
  source 1..20: mol_type = other DNA
tgataccaacctgcccaggg

SEQ ID NO: 17505 - DNA, 20 bp, synthetic construct
  source 1..20: mol_type = other DNA
ccatctattgcttacatttg

SEQ ID NO: 17506 - DNA, 20 bp, synthetic construct
  source 1..20: mol_type = other DNA
ttgataccaacctgcccagg

SEQ ID NO: 17507 - DNA, 20 bp, synthetic construct
  source 1..20: mol_type = other DNA
gccatctattgcttacattt

SEQ ID NO: 17508 - DNA, 23 bp, synthetic construct
  source 1..23: mol_type = other DNA
agagccatctattgcttacattt

SEQ ID NO: 17509 - DNA, 23 bp, synthetic construct
  source 1..23: mol_type = other DNA
accttgataccaacctgcccagg

SEQ ID NO: 17510 - DNA, 23 bp, synthetic construct
  source 1..23: mol_type = other DNA
agagccatctattgcttacattt

SEQ ID NO: 17511 - DNA, 20 bp, synthetic construct
  source 1..20: mol_type = other DNA
cttgataccaacctgcccag

SEQ ID NO: 17512 - DNA, 20 bp, synthetic construct
  source 1..20: mol_type = other DNA
cttgataccaacctgcccag

SEQ ID NO: 17513 - DNA, 20 bp, synthetic construct
  source 1..20: mol_type = other DNA
cttgataccaacctgcccag

SEQ ID NO: 17514 - DNA, 20 bp, synthetic construct
  source 1..20: mol_type = other DNA
agccatctattgcttacatt

SEQ ID NO: 17515 - DNA, 20 bp, synthetic construct
  source 1..20: mol_type = other DNA
agccatctattgcttacatt

SEQ ID NO: 17516 - DNA, 20 bp, synthetic construct
  source 1..20: mol_type = other DNA
agccatctattgcttacatt

SEQ ID NO: 17517 - DNA, 20 bp, synthetic construct
  source 1..20: mol_type = other DNA
cttgataccaacctgcccag

SEQ ID NO: 17518 - DNA, 20 bp, synthetic construct
  source 1..20: mol_type = other DNA
cttgataccaacctgcccag

SEQ ID NO: 17519 - DNA, 20 bp, synthetic construct
  source 1..20: mol_type = other DNA
agccatctattgcttacatt

SEQ ID NO: 17520 - DNA, 20 bp, synthetic construct
  source 1..20: mol_type = other DNA
agccatctattgcttacatt

SEQ ID NO: 17521 - DNA, 20 bp, synthetic construct
  source 1..20: mol_type = other DNA
cttgataccaacctgcccag

SEQ ID NO: 17522 - DNA, 20 bp, synthetic construct
  source 1..20: mol_type = other DNA
agccatctattgcttacatt

SEQ ID NO: 17523 - DNA, 20 bp, synthetic construct
  source 1..20: mol_type = other DNA
ccttgataccaacctgccca

SEQ ID NO: 17524 - DNA, 20 bp, synthetic construct
  source 1..20: mol_type = other DNA
ccttgataccaacctgccca

SEQ ID NO: 17525 - DNA, 20 bp, synthetic construct
  source 1..20: mol_type = other DNA
ccttgataccaacctgccca

SEQ ID NO: 17526 - DNA, 20 bp, synthetic construct
  source 1..20: mol_type = other DNA
ccttgataccaacctgccca

SEQ ID NO: 17527 - DNA, 20 bp, synthetic construct
  source 1..20: mol_type = other DNA
ccttgataccaacctgccca

SEQ ID NO: 17528 - DNA, 20 bp, synthetic construct
  source 1..20: mol_type = other DNA
ccttgataccaacctgccca

SEQ ID NO: 17529 - DNA, 20 bp, synthetic construct
  source 1..20: mol_type = other DNA
ccttgataccaacctgccca

SEQ ID NO: 17530 - DNA, 20 bp, synthetic construct
  source 1..20: mol_type = other DNA
gagccatctattgcttacat

SEQ ID NO: 17531 - DNA, 20 bp, synthetic construct
  source 1..20: mol_type = other DNA
gagccatctattgcttacat

SEQ ID NO: 17532 - DNA, 20 bp, synthetic construct
  source 1..20: mol_type = other DNA
gagccatctattgcttacat

SEQ ID NO: 17533 - DNA, 20 bp, synthetic construct
  source 1..20: mol_type = other DNA
gagccatctattgcttacat

SEQ ID NO: 17534 - DNA, 20 bp, synthetic construct
  source 1..20: mol_type = other DNA
ccttgataccaacctgccca

SEQ ID NO: 17535 - DNA, 20 bp, synthetic construct
  source 1..20: mol_type = other DNA
ccttgataccaacctgccca

SEQ ID NO: 17536 - DNA, 20 bp, synthetic construct
  source 1..20: mol_type = other DNA
ccttgataccaacctgccca

SEQ ID NO: 17537 - DNA, 23 bp, synthetic construct
  source 1..23: mol_type = other DNA
taaccttgataccaacctgccca

SEQ ID NO: 17538 - DNA, 22 bp, synthetic construct
  source 1..22: mol_type = other DNA
aaccttgataccaacctgccca

SEQ ID NO: 17539 - DNA, 22 bp, synthetic construct
  source 1..22: mol_type = other DNA
cagagccatctattgcttacat

SEQ ID NO: 17540 - DNA, 20 bp, synthetic construct
  source 1..20: mol_type = other DNA
ccttgataccaacctgccca

SEQ ID NO: 17541 - DNA, 24 bp, synthetic construct
  source 1..24: mol_type = other DNA
tgtaaccttgataccaacctgccc

SEQ ID NO: 17542 - DNA, 21 bp, synthetic construct
  source 1..21: mol_type = other DNA
aaccttgataccaacctgccc

SEQ ID NO: 17543 - DNA, 21 bp, synthetic construct
  source 1..21: mol_type = other DNA
aaccttgataccaacctgccc

SEQ ID NO: 17544 - DNA, 20 bp, synthetic construct
  source 1..20: mol_type = other DNA
accttgataccaacctgccc

SEQ ID NO: 17545 - DNA, 20 bp, synthetic construct
  source 1..20: mol_type = other DNA
accttgataccaacctgccc

SEQ ID NO: 17546 - DNA, 20 bp, synthetic construct
  source 1..20: mol_type = other DNA
accttgataccaacctgccc

SEQ ID NO: 17547 - DNA, 20 bp, synthetic construct
  source 1..20: mol_type = other DNA
accttgataccaacctgccc

SEQ ID NO: 17548 - DNA, 20 bp, synthetic construct
  source 1..20: mol_type = other DNA
accttgataccaacctgccc

SEQ ID NO: 17549 - DNA, 20 bp, synthetic construct
  source 1..20: mol_type = other DNA
accttgataccaacctgccc

SEQ ID NO: 17550 - DNA, 20 bp, synthetic construct
  source 1..20: mol_type = other DNA
accttgataccaacctgccc

SEQ ID NO: 17551 - DNA, 20 bp, synthetic construct
  source 1..20: mol_type = other DNA
accttgataccaacctgccc

SEQ ID NO: 17552 - DNA, 20 bp, synthetic construct
  source 1..20: mol_type = other DNA
accttgataccaacctgccc

SEQ ID NO: 17553 - DNA, 20 bp, synthetic construct
  source 1..20: mol_type = other DNA
accttgataccaacctgccc

SEQ ID NO: 17554 - DNA, 20 bp, synthetic construct
  source 1..20: mol_type = other DNA
agagccatctattgcttaca

SEQ ID NO: 17555 - DNA, 23 bp, synthetic construct
  source 1..23: mol_type = other DNA
gtaaccttgataccaacctgccc

SEQ ID NO: 17556 - DNA, 23 bp, synthetic construct
  source 1..23: mol_type = other DNA
ggcagagccatctattgcttaca

SEQ ID NO: 17557 - DNA, 23 bp, synthetic construct
  source 1..23: mol_type = other DNA
tgtaaccttgataccaacctgcc

SEQ ID NO: 17558 - DNA, 21 bp, synthetic construct
  source 1..21: mol_type = other DNA
taaccttgataccaacctgcc

SEQ ID NO: 17559 - DNA, 21 bp, synthetic construct
  source 1..21: mol_type = other DNA
taaccttgataccaacctgcc

SEQ ID NO: 17560 - DNA, 21 bp, synthetic construct
  source 1..21: mol_type = other DNA
taaccttgataccaacctgcc

SEQ ID NO: 17561 - DNA, 20 bp, synthetic construct
  source 1..20: mol_type = other DNA
aaccttgataccaacctgcc

SEQ ID NO: 17562 - DNA, 20 bp, synthetic construct
  source 1..20: mol_type = other DNA
aaccttgataccaacctgcc

SEQ ID NO: 17563 - DNA, 20 bp, synthetic construct
  source 1..20: mol_type = other DNA
aaccttgataccaacctgcc

SEQ ID NO: 17564 - DNA, 20 bp, synthetic construct
  source 1..20: mol_type = other DNA
aaccttgataccaacctgcc

SEQ ID NO: 17565 - DNA, 20 bp, synthetic construct
  source 1..20: mol_type = other DNA
cagagccatctattgcttac

SEQ ID NO: 17566 - DNA, 21 bp, synthetic construct
  source 1..21: mol_type = other DNA
taaccttgataccaacctgcc

SEQ ID NO: 17567 - DNA, 21 bp, synthetic construct
  source 1..21: mol_type = other DNA
taaccttgataccaacctgcc

SEQ ID NO: 17568 - DNA, 24 bp, synthetic construct
  source 1..24: mol_type = other DNA
agggcagagccatctattgcttac

SEQ ID NO: 17569 - DNA, 21 bp, synthetic construct
  source 1..21: mol_type = other DNA
gtaaccttgataccaacctgc

SEQ ID NO: 17570 - DNA, 21 bp, synthetic construct
  source 1..21: mol_type = other DNA
gtaaccttgataccaacctgc

SEQ ID NO: 17571 - DNA, 20 bp, synthetic construct
  source 1..20: mol_type = other DNA
gcagagccatctattgctta

SEQ ID NO: 17572 - DNA, 20 bp, synthetic construct
  source 1..20: mol_type = other DNA
taaccttgataccaacctgc

SEQ ID NO: 17573 - DNA, 21 bp, synthetic construct
  source 1..21: mol_type = other DNA
gtaaccttgataccaacctgc

SEQ ID NO: 17574 - DNA, 21 bp, synthetic construct
  source 1..21: mol_type = other DNA
gtaaccttgataccaacctgc

SEQ ID NO: 17575 - DNA, 20 bp, synthetic construct
  source 1..20: mol_type = other DNA
gcagagccatctattgctta

SEQ ID NO: 17576 - DNA, 21 bp, synthetic construct
  source 1..21: mol_type = other DNA
tgtaaccttgataccaacctg

SEQ ID NO: 17577 - DNA, 20 bp, synthetic construct
  source 1..20: mol_type = other DNA
gtaaccttgataccaacctg

SEQ ID NO: 17578 - DNA, 20 bp, synthetic construct
  source 1..20: mol_type = other DNA
ggcagagccatctattgctt

SEQ ID NO: 17579 - DNA, 21 bp, synthetic construct
  source 1..21: mol_type = other DNA
tgtaaccttgataccaacctg

SEQ ID NO: 17580 - DNA, 21 bp, synthetic construct
  source 1..21: mol_type = other DNA
tgtaaccttgataccaacctg

SEQ ID NO: 17581 - DNA, 20 bp, synthetic construct
  source 1..20: mol_type = other DNA
gggcagagccatctattgct

SEQ ID NO: 17582 - DNA, 20 bp, synthetic construct
  source 1..20: mol_type = other DNA
tgtaaccttgataccaacct

SEQ ID NO: 17583 - DNA, 21 bp, synthetic construct
  source 1..21: mol_type = other DNA
agggcagagccatctattgct

SEQ ID NO: 17584 - DNA, 21 bp, synthetic construct
  source 1..21: mol_type = other DNA
agggcagagccatctattgct

SEQ ID NO: 17585 - DNA, 20 bp, synthetic construct
  source 1..20: mol_type = other DNA
gggcagagccatctattgct

SEQ ID NO: 17586 - DNA, 22 bp, synthetic construct
  source 1..22: mol_type = other DNA
tcagggcagagccatctattgc

SEQ ID NO: 17587 - DNA, 24 bp, synthetic construct
  source 1..24: mol_type = other DNA
agtcagggcagagccatctattgc

SEQ ID NO: 17588 - DNA, 20 bp, synthetic construct
  source 1..20: mol_type = other DNA
ttgtaaccttgataccaacc

SEQ ID NO: 17589 - DNA, 20 bp, synthetic construct
  source 1..20: mol_type = other DNA
ttgtaaccttgataccaacc

SEQ ID NO: 17590 - DNA, 20 bp, synthetic construct
  source 1..20: mol_type = other DNA
ttgtaaccttgataccaacc

SEQ ID NO: 17591 - DNA, 20 bp, synthetic construct
  source 1..20: mol_type = other DNA
ttgtaaccttgataccaacc

SEQ ID NO: 17592 - DNA, 20 bp, synthetic construct
  source 1..20: mol_type = other DNA
ttgtaaccttgataccaacc

SEQ ID NO: 17593 - DNA, 20 bp, synthetic construct
  source 1..20: mol_type = other DNA
agggcagagccatctattgc

SEQ ID NO: 17594 - DNA, 23 bp, synthetic construct
  source 1..23: mol_type = other DNA
gtcttgtaaccttgataccaacc

SEQ ID NO: 17595 - DNA, 23 bp, synthetic construct
  source 1..23: mol_type = other DNA
gtcttgtaaccttgataccaacc

SEQ ID NO: 17596 - DNA, 20 bp, synthetic construct
  source 1..20: mol_type = other DNA
ttgtaaccttgataccaacc

SEQ ID NO: 17597 - DNA, 24 bp, synthetic construct
  source 1..24: mol_type = other DNA
ctgtcttgtaaccttgataccaac

SEQ ID NO: 17598 - DNA, 20 bp, synthetic construct
  source 1..20: mol_type = other DNA
cttgtaaccttgataccaac

SEQ ID NO: 17599 - DNA, 20 bp, synthetic construct
  source 1..20: mol_type = other DNA
cttgtaaccttgataccaac

SEQ ID NO: 17600 - DNA, 20 bp, synthetic construct
  source 1..20: mol_type = other DNA
cttgtaaccttgataccaac

SEQ ID NO: 17601 - DNA, 20 bp, synthetic construct
  source 1..20: mol_type = other DNA
cttgtaaccttgataccaac

SEQ ID NO: 17602 - DNA, 20 bp, synthetic construct
  source 1..20: mol_type = other DNA
cagggcagagccatctattg

SEQ ID NO: 17603 - DNA, 23 bp, synthetic construct
  source 1..23: mol_type = other DNA
tgtcttgtaaccttgataccaac

SEQ ID NO: 17604 - DNA, 23 bp, synthetic construct
  source 1..23: mol_type = other DNA
agtcagggcagagccatctattg

SEQ ID NO: 17605 - DNA, 23 bp, synthetic construct
  source 1..23: mol_type = other DNA
tgtcttgtaaccttgataccaac

SEQ ID NO: 17606 - DNA, 23 bp, synthetic construct
  source 1..23: mol_type = other DNA
agtcagggcagagccatctattg

SEQ ID NO: 17607 - DNA, 24 bp, synthetic construct
  source 1..24: mol_type = other DNA
cctgtcttgtaaccttgataccaa

SEQ ID NO: 17608 - DNA, 20 bp, synthetic construct
  source 1..20: mol_type = other DNA
tcttgtaaccttgataccaa

SEQ ID NO: 17609 - DNA, 20 bp, synthetic construct
  source 1..20: mol_type = other DNA
tcagggcagagccatctatt

SEQ ID NO: 17610 - DNA, 23 bp, synthetic construct
  source 1..23: mol_type = other DNA
ctgtcttgtaaccttgataccaa

SEQ ID NO: 17611 - DNA, 20 bp, synthetic construct
  source 1..20: mol_type = other DNA
gtcagggcagagccatctat

SEQ ID NO: 17612 - DNA, 20 bp, synthetic construct
  source 1..20: mol_type = other DNA
gtcagggcagagccatctat

SEQ ID NO: 17613 - DNA, 20 bp, synthetic construct
  source 1..20: mol_type = other DNA
gtcagggcagagccatctat

SEQ ID NO: 17614 - DNA, 20 bp, synthetic construct
  source 1..20: mol_type = other DNA
gtcagggcagagccatctat

SEQ ID NO: 17615 - DNA, 20 bp, synthetic construct
  source 1..20: mol_type = other DNA
gtcagggcagagccatctat

SEQ ID NO: 17616 - DNA, 20 bp, synthetic construct
  source 1..20: mol_type = other DNA
gtcttgtaaccttgatacca

SEQ ID NO: 17617 - DNA, 20 bp, synthetic construct
  source 1..20: mol_type = other DNA
gtcagggcagagccatctat

SEQ ID NO: 17618 - DNA, 20 bp, synthetic construct
  source 1..20: mol_type = other DNA
agtcagggcagagccatcta

SEQ ID NO: 17619 - DNA, 20 bp, synthetic construct
  source 1..20: mol_type = other DNA
agtcagggcagagccatcta

SEQ ID NO: 17620 - DNA, 20 bp, synthetic construct
  source 1..20: mol_type = other DNA
agtcagggcagagccatcta

SEQ ID NO: 17621 - DNA, 20 bp, synthetic construct
  source 1..20: mol_type = other DNA
agtcagggcagagccatcta

SEQ ID NO: 17622 - DNA, 20 bp, synthetic construct
  source 1..20: mol_type = other DNA
tgtcttgtaaccttgatacc

SEQ ID NO: 17623 - DNA, 20 bp, synthetic construct
  source 1..20: mol_type = other DNA
tgtcttgtaaccttgatacc

SEQ ID NO: 17624 - DNA, 20 bp, synthetic construct
  source 1..20: mol_type = other DNA
ctgtcttgtaaccttgatac

SEQ ID NO: 17625 - DNA, 20 bp, synthetic construct
  source 1..20: mol_type = other DNA
aagtcagggcagagccatct

SEQ ID NO: 17626 - DNA, 23 bp, synthetic construct
  source 1..23: mol_type = other DNA
taaaagtcagggcagagccatct

SEQ ID NO: 17627 - DNA, 23 bp, synthetic construct
  source 1..23: mol_type = other DNA
aacctgtcttgtaaccttgatac

SEQ ID NO: 17628 - DNA, 23 bp, synthetic construct
  source 1..23: mol_type = other DNA
taaaagtcagggcagagccatct

SEQ ID NO: 17629 - DNA, 20 bp, synthetic construct
  source 1..20: mol_type = other DNA
ctgtcttgtaaccttgatac

SEQ ID NO: 17630 - DNA, 21 bp, synthetic construct
  source 1..21: mol_type = other DNA
cctgtcttgtaaccttgatac

SEQ ID NO: 17631 - DNA, 24 bp, synthetic construct
  source 1..24: mol_type = other DNA
taaacctgtcttgtaaccttgata

SEQ ID NO: 17632 - DNA, 20 bp, synthetic construct
  source 1..20: mol_type = other DNA
aaagtcagggcagagccatc

SEQ ID NO: 17633 - DNA, 20 bp, synthetic construct
  source 1..20: mol_type = other DNA
cctgtcttgtaaccttgata

SEQ ID NO: 17634 - DNA, 23 bp, synthetic construct
  source 1..23: mol_type = other DNA
aaacctgtcttgtaaccttgata

SEQ ID NO: 17635 - DNA, 23 bp, synthetic construct
  source 1..23: mol_type = other DNA
aaacctgtcttgtaaccttgata

SEQ ID NO: 17636 - DNA, 22 bp, synthetic construct
  source 1..22: mol_type = other DNA
aacctgtcttgtaaccttgata

SEQ ID NO: 17637 - DNA, 24 bp, synthetic construct
  source 1..24: mol_type = other DNA
cataaaagtcagggcagagccatc

SEQ ID NO: 17638 - DNA, 20 bp, synthetic construct
  source 1..20: mol_type = other DNA
aaagtcagggcagagccatc

SEQ ID NO: 17639 - DNA, 21 bp, synthetic construct
  source 1..21: mol_type = other DNA
aacctgtcttgtaaccttgat

SEQ ID NO: 17640 - DNA, 20 bp, synthetic construct
  source 1..20: mol_type = other DNA
acctgtcttgtaaccttgat

SEQ ID NO: 17641 - DNA, 20 bp, synthetic construct
  source 1..20: mol_type = other DNA
aaaagtcagggcagagccat

SEQ ID NO: 17642 - DNA, 21 bp, synthetic construct
  source 1..21: mol_type = other DNA
aacctgtcttgtaaccttgat

SEQ ID NO: 17643 - DNA, 21 bp, synthetic construct
  source 1..21: mol_type = other DNA
aacctgtcttgtaaccttgat

SEQ ID NO: 17644 - DNA, 20 bp, synthetic construct
  source 1..20: mol_type = other DNA
aacctgtcttgtaaccttga

SEQ ID NO: 17645 - DNA, 20 bp, synthetic construct
  source 1..20: mol_type = other DNA
taaaagtcagggcagagcca

SEQ ID NO: 17646 - DNA, 20 bp, synthetic construct
  source 1..20: mol_type = other DNA
aacctgtcttgtaaccttga

SEQ ID NO: 17647 - DNA, 24 bp, synthetic construct
  source 1..24: mol_type = other DNA
gggcataaaagtcagggcagagcc

SEQ ID NO: 17648 - DNA, 20 bp, synthetic construct
  source 1..20: mol_type = other DNA
aaacctgtcttgtaaccttg

SEQ ID NO: 17649 - DNA, 20 bp, synthetic construct
  source 1..20: mol_type = other DNA
ataaaagtcagggcagagcc

SEQ ID NO: 17650 - DNA, 23 bp, synthetic construct
  source 1..23: mol_type = other DNA
cttaaacctgtcttgtaaccttg

SEQ ID NO: 17651 - DNA, 24 bp, synthetic construct
  source 1..24: mol_type = other DNA
tccttaaacctgtcttgtaacctt

SEQ ID NO: 17652 - DNA, 20 bp, synthetic construct
  source 1..20: mol_type = other DNA
taaacctgtcttgtaacctt

SEQ ID NO: 17653 - DNA, 20 bp, synthetic construct
  source 1..20: mol_type = other DNA
taaacctgtcttgtaacctt

SEQ ID NO: 17654 - DNA, 20 bp, synthetic construct
  source 1..20: mol_type = other DNA
cataaaagtcagggcagagc

SEQ ID NO: 17655 - DNA, 23 bp, synthetic construct
  source 1..23: mol_type = other DNA
ccttaaacctgtcttgtaacctt

SEQ ID NO: 17656 - DNA, 23 bp, synthetic construct
  source 1..23: mol_type = other DNA
ccttaaacctgtcttgtaacctt

SEQ ID NO: 17657 - DNA, 23 bp, synthetic construct
  source 1..23: mol_type = other DNA
ccttaaacctgtcttgtaacctt

SEQ ID NO: 17658 - DNA, 20 bp, synthetic construct
  source 1..20: mol_type = other DNA
taaacctgtcttgtaacctt

SEQ ID NO: 17659 - DNA, 20 bp, synthetic construct
  source 1..20: mol_type = other DNA
cataaaagtcagggcagagc

SEQ ID NO: 17660 - DNA, 20 bp, synthetic construct
  source 1..20: mol_type = other DNA
ttaaacctgtcttgtaacct

SEQ ID NO: 17661 - DNA, 20 bp, synthetic construct
  source 1..20: mol_type = other DNA
ttaaacctgtcttgtaacct

SEQ ID NO: 17662 - DNA, 20 bp, synthetic construct
  source 1..20: mol_type = other DNA
ttaaacctgtcttgtaacct

SEQ ID NO: 17663 - DNA, 20 bp, synthetic construct
  source 1..20: mol_type = other DNA
ttaaacctgtcttgtaacct

SEQ ID NO: 17664 - DNA, 20 bp, synthetic construct
  source 1..20: mol_type = other DNA
ttaaacctgtcttgtaacct

SEQ ID NO: 17665 - DNA, 20 bp, synthetic construct
  source 1..20: mol_type = other DNA
gcataaaagtcagggcagag

SEQ ID NO: 17666 - DNA, 23 bp, synthetic construct
  source 1..23: mol_type = other DNA
tgggcataaaagtcagggcagag

SEQ ID NO: 17667 - DNA, 23 bp, synthetic construct
  source 1..23: mol_type = other DNA
tgggcataaaagtcagggcagag

SEQ ID NO: 17668 - DNA, 22 bp, synthetic construct
  source 1..22: mol_type = other DNA
ccttaaacctgtcttgtaacct

SEQ ID NO: 17669 - DNA, 20 bp, synthetic construct
  source 1..20: mol_type = other DNA
ttaaacctgtcttgtaacct

SEQ ID NO: 17670 - DNA, 20 bp, synthetic construct
  source 1..20: mol_type = other DNA
ttaaacctgtcttgtaacct

SEQ ID NO: 17671 - DNA, 20 bp, synthetic construct
  source 1..20: mol_type = other DNA
cttaaacctgtcttgtaacc

SEQ ID NO: 17672 - DNA, 20 bp, synthetic construct
  source 1..20: mol_type = other DNA
cttaaacctgtcttgtaacc

SEQ ID NO: 17673 - DNA, 20 bp, synthetic construct
  source 1..20: mol_type = other DNA
cttaaacctgtcttgtaacc

SEQ ID NO: 17674 - DNA, 20 bp, synthetic construct
  source 1..20: mol_type = other DNA
cttaaacctgtcttgtaacc

SEQ ID NO: 17675 - DNA, 20 bp, synthetic construct
  source 1..20: mol_type = other DNA
ggcataaaagtcagggcaga

SEQ ID NO: 17676 - DNA, 22 bp, synthetic construct
  source 1..22: mol_type = other DNA
tccttaaacctgtcttgtaacc

SEQ ID NO: 17677 - DNA, 21 bp, synthetic construct
  source 1..21: mol_type = other DNA
tccttaaacctgtcttgtaac

SEQ ID NO: 17678 - DNA, 21 bp, synthetic construct
  source 1..21: mol_type = other DNA
tccttaaacctgtcttgtaac

SEQ ID NO: 17679 - DNA, 20 bp, synthetic construct
  source 1..20: mol_type = other DNA
gggcataaaagtcagggcag

SEQ ID NO: 17680 - DNA, 20 bp, synthetic construct
  source 1..20: mol_type = other DNA
gggcataaaagtcagggcag

SEQ ID NO: 17681 - DNA, 20 bp, synthetic construct
  source 1..20: mol_type = other DNA
gggcataaaagtcagggcag

SEQ ID NO: 17682 - DNA, 20 bp, synthetic construct
  source 1..20: mol_type = other DNA
gggcataaaagtcagggcag

SEQ ID NO: 17683 - DNA, 20 bp, synthetic construct
  source 1..20: mol_type = other DNA
gggcataaaagtcagggcag

SEQ ID NO: 17684 - DNA, 20 bp, synthetic construct
  source 1..20: mol_type = other DNA
ccttaaacctgtcttgtaac

SEQ ID NO: 17685 - DNA, 23 bp, synthetic construct
  source 1..23: mol_type = other DNA
tctccttaaacctgtcttgtaac

SEQ ID NO: 17686 - DNA, 20 bp, synthetic construct
  source 1..20: mol_type = other DNA
gggcataaaagtcagggcag

SEQ ID NO: 17687 - DNA, 20 bp, synthetic construct
  source 1..20: mol_type = other DNA
tgggcataaaagtcagggca

SEQ ID NO: 17688 - DNA, 20 bp, synthetic construct
  source 1..20: mol_type = other DNA
tgggcataaaagtcagggca

SEQ ID NO: 17689 - DNA, 20 bp, synthetic construct
  source 1..20: mol_type = other DNA
tgggcataaaagtcagggca

SEQ ID NO: 17690 - DNA, 20 bp, synthetic construct
  source 1..20: mol_type = other DNA
tgggcataaaagtcagggca

SEQ ID NO: 17691 - DNA, 20 bp, synthetic construct
  source 1..20: mol_type = other DNA
tccttaaacctgtcttgtaa

SEQ ID NO: 17692 - DNA, 23 bp, synthetic construct
  source 1..23: mol_type = other DNA
ggctgggcataaaagtcagggca

SEQ ID NO: 17693 - DNA, 22 bp, synthetic construct
  source 1..22: mol_type = other DNA
gctgggcataaaagtcagggca

SEQ ID NO: 17694 - DNA, 24 bp, synthetic construct
  source 1..24: mol_type = other DNA
ggtctccttaaacctgtcttgtaa

SEQ ID NO: 17695 - DNA, 20 bp, synthetic construct
  source 1..20: mol_type = other DNA
tgggcataaaagtcagggca

SEQ ID NO: 17696 - DNA, 24 bp, synthetic construct
  source 1..24: mol_type = other DNA
agggctgggcataaaagtcagggc

SEQ ID NO: 17697 - DNA, 21 bp, synthetic construct
  source 1..21: mol_type = other DNA
gctgggcataaaagtcagggc

SEQ ID NO: 17698 - DNA, 20 bp, synthetic construct
  source 1..20: mol_type = other DNA
ctgggcataaaagtcagggc

SEQ ID NO: 17699 - DNA, 20 bp, synthetic construct
  source 1..20: mol_type = other DNA
ctgggcataaaagtcagggc

SEQ ID NO: 17700 - DNA, 20 bp, synthetic construct
  source 1..20: mol_type = other DNA
ctgggcataaaagtcagggc

SEQ ID NO: 17701 - DNA, 20 bp, synthetic construct
  source 1..20: mol_type = other DNA
ctgggcataaaagtcagggc

SEQ ID NO: 17702 - DNA, 20 bp, synthetic construct
  source 1..20: mol_type = other DNA
ctgggcataaaagtcagggc

SEQ ID NO: 17703 - DNA, 20 bp, synthetic construct
  source 1..20: mol_type = other DNA
ctgggcataaaagtcagggc

SEQ ID NO: 17704 - DNA, 20 bp, synthetic construct
  source 1..20: mol_type = other DNA
ctccttaaacctgtcttgta

SEQ ID NO: 17705 - DNA, 23 bp, synthetic construct
  source 1..23: mol_type = other DNA
gggctgggcataaaagtcagggc

SEQ ID NO: 17706 - DNA, 23 bp, synthetic construct
  source 1..23: mol_type = other DNA
gggctgggcataaaagtcagggc

SEQ ID NO: 17707 - DNA, 23 bp, synthetic construct
  source 1..23: mol_type = other DNA
agggctgggcataaaagtcaggg

SEQ ID NO: 17708 - DNA, 21 bp, synthetic construct
  source 1..21: mol_type = other DNA
ggctgggcataaaagtcaggg

SEQ ID NO: 17709 - DNA, 20 bp, synthetic construct
  source 1..20: mol_type = other DNA
gctgggcataaaagtcaggg

SEQ ID NO: 17710 - DNA, 20 bp, synthetic construct
  source 1..20: mol_type = other DNA
gctgggcataaaagtcaggg

SEQ ID NO: 17711 - DNA, 20 bp, synthetic construct
  source 1..20: mol_type = other DNA
gctgggcataaaagtcaggg

SEQ ID NO: 17712 - DNA, 20 bp, synthetic construct
  source 1..20: mol_type = other DNA
gctgggcataaaagtcaggg

SEQ ID NO: 17713 - DNA, 20 bp, synthetic construct
  source 1..20: mol_type = other DNA
tctccttaaacctgtcttgt

SEQ ID NO: 17714 - DNA, 21 bp, synthetic construct
  source 1..21: mol_type = other DNA
ggctgggcataaaagtcaggg

SEQ ID NO: 17715 - DNA, 21 bp, synthetic construct
  source 1..21: mol_type = other DNA
ggctgggcataaaagtcaggg

SEQ ID NO: 17716 - DNA, 20 bp, synthetic construct
  source 1..20: mol_type = other DNA
gctgggcataaaagtcaggg

SEQ ID NO: 17717 - DNA, 20 bp, synthetic construct
  source 1..20: mol_type = other DNA
tctccttaaacctgtcttgt

SEQ ID NO: 17718 - DNA, 21 bp, synthetic construct
  source 1..21: mol_type = other DNA
gggctgggcataaaagtcagg

SEQ ID NO: 17719 - DNA, 21 bp, synthetic construct
  source 1..21: mol_type = other DNA
gggctgggcataaaagtcagg

SEQ ID NO: 17720 - DNA, 20 bp, synthetic construct
  source 1..20: mol_type = other DNA
gtctccttaaacctgtcttg

SEQ ID NO: 17721 - DNA, 20 bp, synthetic construct
  source 1..20: mol_type = other DNA
ggctgggcataaaagtcagg

SEQ ID NO: 17722 - DNA, 23 bp, synthetic construct
  source 1..23: mol_type = other DNA
ttggtctccttaaacctgtcttg

SEQ ID NO: 17723 - DNA, 23 bp, synthetic construct
  source 1..23: mol_type = other DNA
ttggtctccttaaacctgtcttg

SEQ ID NO: 17724 - DNA, 21 bp, synthetic construct
  source 1..21: mol_type = other DNA
gggctgggcataaaagtcagg

SEQ ID NO: 17725 - DNA, 21 bp, synthetic construct
  source 1..21: mol_type = other DNA
gggctgggcataaaagtcagg

SEQ ID NO: 17726 - DNA, 22 bp, synthetic construct
  source 1..22: mol_type = other DNA
tggtctccttaaacctgtcttg

SEQ ID NO: 17727 - DNA, 20 bp, synthetic construct
  source 1..20: mol_type = other DNA
gtctccttaaacctgtcttg

SEQ ID NO: 17728 - DNA, 21 bp, synthetic construct
  source 1..21: mol_type = other DNA
ggtctccttaaacctgtcttg

SEQ ID NO: 17729 - DNA, 24 bp, synthetic construct
  source 1..24: mol_type = other DNA
tattggtctccttaaacctgtctt

SEQ ID NO: 17730 - DNA, 21 bp, synthetic construct
  source 1..21: mol_type = other DNA
agggctgggcataaaagtcag

SEQ ID NO: 17731 - DNA, 20 bp, synthetic construct
  source 1..20: mol_type = other DNA
gggctgggcataaaagtcag

SEQ ID NO: 17732 - DNA, 20 bp, synthetic construct
  source 1..20: mol_type = other DNA
gggctgggcataaaagtcag

SEQ ID NO: 17733 - DNA, 20 bp, synthetic construct
  source 1..20: mol_type = other DNA
gggctgggcataaaagtcag

SEQ ID NO: 17734 - DNA, 20 bp, synthetic construct
  source 1..20: mol_type = other DNA
gggctgggcataaaagtcag

SEQ ID NO: 17735 - DNA, 20 bp, synthetic construct
  source 1..20: mol_type = other DNA
gggctgggcataaaagtcag

SEQ ID NO: 17736 - DNA, 20 bp, synthetic construct
  source 1..20: mol_type = other DNA
ggtctccttaaacctgtctt

SEQ ID NO: 17737 - DNA, 23 bp, synthetic construct
  source 1..23: mol_type = other DNA
attggtctccttaaacctgtctt

SEQ ID NO: 17738 - DNA, 23 bp, synthetic construct
  source 1..23: mol_type = other DNA
attggtctccttaaacctgtctt

SEQ ID NO: 17739 - DNA, 21 bp, synthetic construct
  source 1..21: mol_type = other DNA
agggctgggcataaaagtcag

SEQ ID NO: 17740 - DNA, 21 bp, synthetic construct
  source 1..21: mol_type = other DNA
agggctgggcataaaagtcag

SEQ ID NO: 17741 - DNA, 22 bp, synthetic construct
  source 1..22: mol_type = other DNA
ttggtctccttaaacctgtctt

SEQ ID NO: 17742 - DNA, 20 bp, synthetic construct
  source 1..20: mol_type = other DNA
gggctgggcataaaagtcag

SEQ ID NO: 17743 - DNA, 21 bp, synthetic construct
  source 1..21: mol_type = other DNA
ttggtctccttaaacctgtct

SEQ ID NO: 17744 - DNA, 20 bp, synthetic construct
  source 1..20: mol_type = other DNA
agggctgggcataaaagtca

SEQ ID NO: 17745 - DNA, 20 bp, synthetic construct
  source 1..20: mol_type = other DNA
agggctgggcataaaagtca

SEQ ID NO: 17746 - DNA, 20 bp, synthetic construct
  source 1..20: mol_type = other DNA
agggctgggcataaaagtca

SEQ ID NO: 17747 - DNA, 20 bp, synthetic construct
  source 1..20: mol_type = other DNA
agggctgggcataaaagtca

SEQ ID NO: 17748 - DNA, 20 bp, synthetic construct
  source 1..20: mol_type = other DNA
agggctgggcataaaagtca

SEQ ID NO: 17749 - DNA, 20 bp, synthetic construct
  source 1..20: mol_type = other DNA
agggctgggcataaaagtca

SEQ ID NO: 17750 - DNA, 20 bp, synthetic construct
  source 1..20: mol_type = other DNA
agggctgggcataaaagtca

SEQ ID NO: 17751 - DNA, 20 bp, synthetic construct
  source 1..20: mol_type = other DNA
tggtctccttaaacctgtct

SEQ ID NO: 17752 - DNA, 20 bp, synthetic construct
  source 1..20: mol_type = other DNA
tggtctccttaaacctgtct

SEQ ID NO: 17753 - DNA, 20 bp, synthetic construct
  source 1..20: mol_type = other DNA
tggtctccttaaacctgtct

SEQ ID NO: 17754 - DNA, 20 bp, synthetic construct
  source 1..20: mol_type = other DNA
agggctgggcataaaagtca

SEQ ID NO: 17755 - DNA, 20 bp, synthetic construct
  source 1..20: mol_type = other DNA
agggctgggcataaaagtca

SEQ ID NO: 17756 - DNA, 20 bp, synthetic construct
  source 1..20: mol_type = other DNA
agggctgggcataaaagtca

SEQ ID NO: 17757 - DNA, 20 bp, synthetic construct
  source 1..20: mol_type = other DNA
tggtctccttaaacctgtct

SEQ ID NO: 17758 - DNA, 20 bp, synthetic construct
  source 1..20: mol_type = other DNA
tggtctccttaaacctgtct

SEQ ID NO: 17759 - DNA, 20 bp, synthetic construct
  source 1..20: mol_type = other DNA
agggctgggcataaaagtca

SEQ ID NO: 17760 - DNA, 20 bp, synthetic construct
  source 1..20: mol_type = other DNA
tggtctccttaaacctgtct

SEQ ID NO: 17761 - DNA, 21 bp, synthetic construct
  source 1..21: mol_type = other DNA
ccagggctgggcataaaagtc

SEQ ID NO: 17762 - DNA, 21 bp, synthetic construct
  source 1..21: mol_type = other DNA
ccagggctgggcataaaagtc

SEQ ID NO: 17763 - DNA, 20 bp, synthetic construct
  source 1..20: mol_type = other DNA
ttggtctccttaaacctgtc

SEQ ID NO: 17764 - DNA, 20 bp, synthetic construct
  source 1..20: mol_type = other DNA
ttggtctccttaaacctgtc

SEQ ID NO: 17765 - DNA, 20 bp, synthetic construct
  source 1..20: mol_type = other DNA
ttggtctccttaaacctgtc

SEQ ID NO: 17766 - DNA, 20 bp, synthetic construct
  source 1..20: mol_type = other DNA
ttggtctccttaaacctgtc

SEQ ID NO: 17767 - DNA, 20 bp, synthetic construct
  source 1..20: mol_type = other DNA
cagggctgggcataaaagtc

SEQ ID NO: 17768 - DNA, 20 bp, synthetic construct
  source 1..20: mol_type = other DNA
cagggctgggcataaaagtc

SEQ ID NO: 17769 - DNA, 20 bp, synthetic construct
  source 1..20: mol_type = other DNA
cagggctgggcataaaagtc

SEQ ID NO: 17770 - DNA, 20 bp, synthetic construct
  source 1..20: mol_type = other DNA
cagggctgggcataaaagtc

SEQ ID NO: 17771 - DNA, 20 bp, synthetic construct
  source 1..20: mol_type = other DNA
cagggctgggcataaaagtc

SEQ ID NO: 17772 - DNA, 20 bp, synthetic construct
  source 1..20: mol_type = other DNA
cagggctgggcataaaagtc

SEQ ID NO: 17773 - DNA, 20 bp, synthetic construct
  source 1..20: mol_type = other DNA
cagggctgggcataaaagtc

SEQ ID NO: 17774 - DNA, 20 bp, synthetic construct
  source 1..20: mol_type = other DNA
cagggctgggcataaaagtc

SEQ ID NO: 17775 - DNA, 20 bp, synthetic construct
  source 1..20: mol_type = other DNA
cagggctgggcataaaagtc

SEQ ID NO: 17776 - DNA, 20 bp, synthetic construct
  source 1..20: mol_type = other DNA
cagggctgggcataaaagtc

SEQ ID NO: 17777 - DNA, 23 bp, synthetic construct
  source 1..23: mol_type = other DNA
agccagggctgggcataaaagtc

SEQ ID NO: 17778 - DNA, 23 bp, synthetic construct
  source 1..23: mol_type = other DNA
agccagggctgggcataaaagtc

SEQ ID NO: 17779 - DNA, 22 bp, synthetic construct
  source 1..22: mol_type = other DNA
tattggtctccttaaacctgtc

SEQ ID NO: 17780 - DNA, 23 bp, synthetic construct
  source 1..23: mol_type = other DNA
gagccagggctgggcataaaagt

SEQ ID NO: 17781 - DNA, 21 bp, synthetic construct
  source 1..21: mol_type = other DNA
gccagggctgggcataaaagt

SEQ ID NO: 17782 - DNA, 21 bp, synthetic construct
  source 1..21: mol_type = other DNA
gccagggctgggcataaaagt

SEQ ID NO: 17783 - DNA, 21 bp, synthetic construct
  source 1..21: mol_type = other DNA
gccagggctgggcataaaagt

SEQ ID NO: 17784 - DNA, 20 bp, synthetic construct
  source 1..20: mol_type = other DNA
ccagggctgggcataaaagt

SEQ ID NO: 17785 - DNA, 20 bp, synthetic construct
  source 1..20: mol_type = other DNA
ccagggctgggcataaaagt

SEQ ID NO: 17786 - DNA, 20 bp, synthetic construct
  source 1..20: mol_type = other DNA
ccagggctgggcataaaagt

SEQ ID NO: 17787 - DNA, 20 bp, synthetic construct
  source 1..20: mol_type = other DNA
ccagggctgggcataaaagt

SEQ ID NO: 17788 - DNA, 20 bp, synthetic construct
  source 1..20: mol_type = other DNA
attggtctccttaaacctgt

SEQ ID NO: 17789 - DNA, 21 bp, synthetic construct
  source 1..21: mol_type = other DNA
gccagggctgggcataaaagt

SEQ ID NO: 17790 - DNA, 21 bp, synthetic construct
  source 1..21: mol_type = other DNA
gccagggctgggcataaaagt

SEQ ID NO: 17791 - DNA, 21 bp, synthetic construct
  source 1..21: mol_type = other DNA
agccagggctgggcataaaag

SEQ ID NO: 17792 - DNA, 21 bp, synthetic construct
  source 1..21: mol_type = other DNA
agccagggctgggcataaaag

SEQ ID NO: 17793 - DNA, 20 bp, synthetic construct
  source 1..20: mol_type = other DNA
tattggtctccttaaacctg

SEQ ID NO: 17794 - DNA, 20 bp, synthetic construct
  source 1..20: mol_type = other DNA
gccagggctgggcataaaag

SEQ ID NO: 17795 - DNA, 21 bp, synthetic construct
  source 1..21: mol_type = other DNA
agccagggctgggcataaaag

SEQ ID NO: 17796 - DNA, 21 bp, synthetic construct
  source 1..21: mol_type = other DNA
agccagggctgggcataaaag

SEQ ID NO: 17797 - DNA, 21 bp, synthetic construct
  source 1..21: mol_type = other DNA
gagccagggctgggcataaaa

SEQ ID NO: 17798 - DNA, 20 bp, synthetic construct
  source 1..20: mol_type = other DNA
ctattggtctccttaaacct

SEQ ID NO: 17799 - DNA, 20 bp, synthetic construct
  source 1..20: mol_type = other DNA
agccagggctgggcataaaa

SEQ ID NO: 17800 - DNA, 21 bp, synthetic construct
  source 1..21: mol_type = other DNA
gagccagggctgggcataaaa

SEQ ID NO: 17801 - DNA, 21 bp, synthetic construct
  source 1..21: mol_type = other DNA
gagccagggctgggcataaaa

SEQ ID NO: 17802 - DNA, 20 bp, synthetic construct
  source 1..20: mol_type = other DNA
tctattggtctccttaaacc

SEQ ID NO: 17803 - DNA, 20 bp, synthetic construct
  source 1..20: mol_type = other DNA
tctattggtctccttaaacc

SEQ ID NO: 17804 - DNA, 20 bp, synthetic construct
  source 1..20: mol_type = other DNA
tctattggtctccttaaacc

SEQ ID NO: 17805 - DNA, 20 bp, synthetic construct
  source 1..20: mol_type = other DNA
gagccagggctgggcataaa

SEQ ID NO: 17806 - DNA, 20 bp, synthetic construct
  source 1..20: mol_type = other DNA
gagccagggctgggcataaa

SEQ ID NO: 17807 - DNA, 20 bp, synthetic construct
  source 1..20: mol_type = other DNA
gagccagggctgggcataaa

SEQ ID NO: 17808 - DNA, 20 bp, synthetic construct
  source 1..20: mol_type = other DNA
tctattggtctccttaaacc

SEQ ID NO: 17809 - DNA, 20 bp, synthetic construct
  source 1..20: mol_type = other DNA
tctattggtctccttaaacc

SEQ ID NO: 17810 - DNA, 20 bp, synthetic construct
  source 1..20: mol_type = other DNA
gagccagggctgggcataaa

SEQ ID NO: 17811 - DNA, 20 bp, synthetic construct
  source 1..20: mol_type = other DNA
gagccagggctgggcataaa

SEQ ID NO: 17812 - DNA, 20 bp, synthetic construct
  source 1..20: mol_type = other DNA
tctattggtctccttaaacc

SEQ ID NO: 17813 - DNA, 20 bp, synthetic construct
  source 1..20: mol_type = other DNA
gagccagggctgggcataaa

SEQ ID NO: 17814 - DNA, 20 bp, synthetic construct
  source 1..20: mol_type = other DNA
ttctattggtctccttaaac

SEQ ID NO: 17815 - DNA, 20 bp, synthetic construct
  source 1..20: mol_type = other DNA
ttctattggtctccttaaac

SEQ ID NO: 17816 - DNA, 20 bp, synthetic construct
  source 1..20: mol_type = other DNA
ttctattggtctccttaaac

SEQ ID NO: 17817 - DNA, 20 bp, synthetic construct
  source 1..20: mol_type = other DNA
ttctattggtctccttaaac

SEQ ID NO: 17818 - DNA, 20 bp, synthetic construct
  source 1..20: mol_type = other DNA
ggagccagggctgggcataa

SEQ ID NO: 17819 - DNA, 20 bp, synthetic construct
  source 1..20: mol_type = other DNA
ggagccagggctgggcataa

SEQ ID NO: 17820 - DNA, 20 bp, synthetic construct
  source 1..20: mol_type = other DNA
ggagccagggctgggcataa

SEQ ID NO: 17821 - DNA, 20 bp, synthetic construct
  source 1..20: mol_type = other DNA
ggagccagggctgggcataa

SEQ ID NO: 17822 - DNA, 23 bp, synthetic construct
  source 1..23: mol_type = other DNA
agtttctattggtctccttaaac

SEQ ID NO: 17823 - DNA, 23 bp, synthetic construct
  source 1..23: mol_type = other DNA
gcaggagccagggctgggcataa

SEQ ID NO: 17824 - DNA, 23 bp, synthetic construct
  source 1..23: mol_type = other DNA
agtttctattggtctccttaaac

SEQ ID NO: 17825 - DNA, 23 bp, synthetic construct
  source 1..23: mol_type = other DNA
gcaggagccagggctgggcataa

SEQ ID NO: 17826 - DNA, 22 bp, synthetic construct
  source 1..22: mol_type = other DNA
gtttctattggtctccttaaac

SEQ ID NO: 17827 - DNA, 20 bp, synthetic construct
  source 1..20: mol_type = other DNA
ggagccagggctgggcataa

SEQ ID NO: 17828 - DNA, 21 bp, synthetic construct
  source 1..21: mol_type = other DNA
caggagccagggctgggcata

SEQ ID NO: 17829 - DNA, 20 bp, synthetic construct
  source 1..20: mol_type = other DNA
aggagccagggctgggcata

SEQ ID NO: 17830 - DNA, 21 bp, synthetic construct
  source 1..21: mol_type = other DNA
caggagccagggctgggcata

SEQ ID NO: 17831 - DNA, 20 bp, synthetic construct
  source 1..20: mol_type = other DNA
aggagccagggctgggcata

SEQ ID NO: 17832 - DNA, 20 bp, synthetic construct
  source 1..20: mol_type = other DNA
tttctattggtctccttaaa

SEQ ID NO: 17833 - DNA, 51 bp, synthetic construct
  source 1..51: mol_type = other DNA
cttcatccacgttcaccttgccccacagggcagtaacggcagacttctcct

SEQ ID NO: 17834 - DNA, 51 bp, synthetic construct; identical to SEQ ID NO: 17833
  source 1..51: mol_type = other DNA

SEQ ID NO: 17835 - DNA, 51 bp, synthetic construct; identical to SEQ ID NO: 17833
  source 1..51: mol_type = other DNA

SEQ ID NO: 17836 - DNA, 51 bp, synthetic construct; identical to SEQ ID NO: 17833
  source 1..51: mol_type = other DNA

SEQ ID NO: 17837 - DNA, 52 bp, synthetic construct
  source 1..52: mol_type = other DNA
cttcatccacgttcaccttgccccacagggcagtaacggcagacttctcctc

SEQ ID NO: 17838 - DNA, 52 bp, synthetic construct; identical to SEQ ID NO: 17837
  source 1..52: mol_type = other DNA

SEQ ID NO: 17839 - DNA, 52 bp, synthetic construct
  source 1..52: mol_type = other DNA
ctgtgttcactagcaacctcaaacagacaccatggtgcatctgactcctgag

SEQ ID NO: 17840 - DNA, 52 bp, synthetic construct; identical to SEQ ID NO: 17839
  source 1..52: mol_type = other DNA

SEQ ID NO: 17841 - DNA, 52 bp, synthetic construct; identical to SEQ ID NO: 17839
  source 1..52: mol_type = other DNA

SEQ ID NO: 17842 - DNA, 52 bp, synthetic construct; identical to SEQ ID NO: 17839
  source 1..52: mol_type = other DNA

SEQ ID NO: 17843 - DNA, 52 bp, synthetic construct; identical to SEQ ID NO: 17837
  source 1..52: mol_type = other DNA

SEQ ID NO: 17844 - DNA, 52 bp, synthetic construct; identical to SEQ ID NO: 17837
  source 1..52: mol_type = other DNA

SEQ ID NO: 17845 - DNA, 52 bp, synthetic construct; identical to SEQ ID NO: 17839
  source 1..52: mol_type = other DNA

SEQ ID NO: 17846 - DNA, 52 bp, synthetic construct; identical to SEQ ID NO: 17839
  source 1..52: mol_type = other DNA

SEQ ID NO: 17847 - DNA, 52 bp, synthetic construct; identical to SEQ ID NO: 17839
  source 1..52: mol_type = other DNA

SEQ ID NO: 17848 - DNA, 52 bp, synthetic construct; identical to SEQ ID NO: 17839
  source 1..52: mol_type = other DNA

SEQ ID NO: 17849 - DNA, 53 bp, synthetic construct
  source 1..53: mol_type = other DNA
ctgtgttcactagcaacctcaaacagacaccatggtgcatctgactcctgagg

SEQ ID NO: 17850 - DNA, 53 bp, synthetic construct; identical to SEQ ID NO: 17849
  source 1..53: mol_type = other DNA

SEQ ID NO: 17851 - DNA, 53 bp, synthetic construct
  source 1..53: mol_type = other DNA
cttcatccacgttcaccttgccccacagggcagtaacggcagacttctcctca

SEQ ID NO: 17852 - DNA, 53 bp, synthetic construct; identical to SEQ ID NO: 17849
  source 1..53: mol_type = other DNA

SEQ ID NO: 17853 - DNA, 53 bp, synthetic construct; identical to SEQ ID NO: 17849
  source 1..53: mol_type = other DNA

SEQ ID NO: 17854 - DNA, 53 bp, synthetic construct; identical to SEQ ID NO: 17851
  source 1..53: mol_type = other DNA

SEQ ID NO: 17855 - DNA, 53 bp, synthetic construct; identical to SEQ ID NO: 17849
  source 1..53: mol_type = other DNA

SEQ ID NO: 17856 - DNA, 53 bp, synthetic construct; identical to SEQ ID NO: 17849
  source 1..53: mol_type = other DNA

SEQ ID NO: 17857 - DNA, 53 bp, synthetic construct; identical to SEQ ID NO: 17851
  source 1..53: mol_type = other DNA

SEQ ID NO: 17858 - DNA, 53 bp, synthetic construct; identical to SEQ ID NO: 17851
  source 1..53: mol_type = other DNA

SEQ ID NO: 17859 - DNA, 54 bp, synthetic construct
  source 1..54: mol_type = other DNA
cttcatccacgttcaccttgccccacagggcagtaacggcagacttctcctcag

SEQ ID NO: 17860 - DNA, 54 bp, synthetic construct; identical to SEQ ID NO: 17859
  source 1..54: mol_type = other DNA

SEQ ID NO: 17861 - DNA, 54 bp, synthetic construct
  source 1..54: mol_type = other DNA
ctgtgttcactagcaacctcaaacagacaccatggtgcatctgactcctgagga

SEQ ID NO: 17862 - DNA, 54 bp, synthetic construct; identical to SEQ ID NO: 17861
  source 1..54: mol_type = other DNA

SEQ ID NO: 17863 - DNA, 54 bp, synthetic construct; identical to SEQ ID NO: 17859
  source 1..54: mol_type = other DNA

SEQ ID NO: 17864 - DNA, 54 bp, synthetic construct; identical to SEQ ID NO: 17859
  source 1..54: mol_type = other DNA

SEQ ID NO: 17865 - DNA, 54 bp, synthetic construct; identical to SEQ ID NO: 17859
  source 1..54: mol_type = other DNA

SEQ ID NO: 17866 - DNA, 54 bp, synthetic construct; identical to SEQ ID NO: 17859
  source 1..54: mol_type = other DNA

SEQ ID NO: 17867 - DNA, 54 bp, synthetic construct; identical to SEQ ID NO: 17861
  source 1..54: mol_type = other DNA

SEQ ID NO: 17868 - DNA, 55 bp, synthetic construct
  source 1..55: mol_type = other DNA
cttcatccacgttcaccttgccccacagggcagtaacggcagacttctcctcagg

SEQ ID NO: 17869 - DNA, 55 bp, synthetic construct; identical to SEQ ID NO: 17868
  source 1..55: mol_type = other DNA

SEQ ID NO: 17870 - DNA, 55 bp, synthetic construct
  source 1..55: mol_type = other DNA
ctgtgttcactagcaacctcaaacagacaccatggtgcatctgactcctgaggag

SEQ ID NO: 17871 - DNA, 55 bp, synthetic construct; identical to SEQ ID NO: 17868
  source 1..55: mol_type = other DNA

SEQ ID NO: 17872 - DNA, 55 bp, synthetic construct; identical to SEQ ID NO: 17868
  source 1..55: mol_type = other DNA

SEQ ID NO: 17873 - DNA, 55 bp, synthetic construct; identical to SEQ ID NO: 17868
  source 1..55: mol_type = other DNA

SEQ ID NO: 17874 - DNA, 55 bp, synthetic construct; identical to SEQ ID NO: 17868
  source 1..55: mol_type = other DNA

SEQ ID NO: 17875 - DNA, 55 bp, synthetic construct; identical to SEQ ID NO: 17870
  source 1..55: mol_type = other DNA

SEQ ID NO: 17876 - DNA, 56 bp, synthetic construct
  source 1..56: mol_type = other DNA
cttcatccacgttcaccttgccccacagggcagtaacggcagacttctcctcagga

SEQ ID NO: 17877 - DNA, 56 bp, synthetic construct; identical to SEQ ID NO: 17876
  source 1..56: mol_type = other DNA

SEQ ID NO: 17878 - DNA, 56 bp, synthetic construct; identical to SEQ ID NO: 17876
  source 1..56: mol_type = other DNA

SEQ ID NO: 17879 - DNA, 56 bp, synthetic construct
  source 1..56: mol_type = other DNA
ctgtgttcactagcaacctcaaacagacaccatggtgcatctgactcctgaggaga

SEQ ID NO: 17880 - DNA, 57 bp, synthetic construct
  source 1..57: mol_type = other DNA
cttcatccacgttcaccttgccccacagggcagtaacggcagacttctcctcaggag

SEQ ID NO: 17881 - DNA, 57 bp, synthetic construct; identical to SEQ ID NO: 17880
  source 1..57: mol_type = other DNA

SEQ ID NO: 17882 - DNA, 57 bp, synthetic construct
  source 1..57: mol_type = other DNA
ctgtgttcactagcaacctcaaacagacaccatggtgcatctgactcctgaggagaa

SEQ ID NO: 17883 - DNA, 57 bp, synthetic construct; identical to SEQ ID NO: 17882
  source 1..57: mol_type = other DNA

SEQ ID NO: 17884 - DNA, 57 bp, synthetic construct; identical to SEQ ID NO: 17882
  source 1..57: mol_type = other DNA

SEQ ID NO: 17885 - DNA, 58 bp, synthetic construct
  source 1..58: mol_type = other DNA
ctgtgttcactagcaacctcaaacagacaccatggtgcatctgactcctgaggagaag

SEQ ID NO: 17886 - DNA, 58 bp, synthetic construct
  source 1..58: mol_type = other DNA
cttcatccacgttcaccttgccccacagggcagtaacggcagacttctcctcaggagt

SEQ ID NO: 17887 - DNA, 59 bp, synthetic construct
  source 1..59: mol_type = other DNA
ctgtgttcactagcaacctcaaacagacaccatggtgcatctgactcctgaggagaagt

SEQ ID NO: 17888 - DNA, 59 bp, synthetic construct
  source 1..59: mol_type = other DNA
cttcatccacgttcaccttgccccacagggcagtaacggcagacttctcctcaggagtc

SEQ ID NO: 17889 - DNA, 59 bp, synthetic construct; identical to SEQ ID NO: 17887
  source 1..59: mol_type = other DNA

SEQ ID NO: 17890 - DNA, 60 bp, synthetic construct
  source 1..60: mol_type = other DNA
ctgtgttcactagcaacctcaaacagacaccatggtgcatctgactcctgaggagaagtc

SEQ ID NO: 17891 - DNA, 60 bp, synthetic construct; identical to SEQ ID NO: 17890
  source 1..60: mol_type = other DNA

SEQ ID NO: 17892 - DNA, 60 bp, synthetic construct
  source 1..60: mol_type = other DNA
cttcatccacgttcaccttgccccacagggcagtaacggcagacttctcctcaggagtca

SEQ ID NO: 17893 - DNA, 60 bp, synthetic construct; identical to SEQ ID NO: 17890
  source 1..60: mol_type = other DNA

SEQ ID NO: 17894 - DNA, 61 bp, synthetic construct
  source 1..61: mol_type = other DNA
ctgtgttcactagcaacctcaaacagacaccatggtgcatctgactcctgaggagaagtct

SEQ ID NO: 17895 - DNA, 61 bp, synthetic construct
  source 1..61: mol_type = other DNA
cttcatccacgttcaccttgccccacagggcagtaacggcagacttctcctcaggagtcag

SEQ ID NO: 17896 - DNA, 61 bp, synthetic construct; identical to SEQ ID NO: 17895
  source 1..61: mol_type = other DNA

SEQ ID NO: 17897 - DNA, 61 bp, synthetic construct; identical to SEQ ID NO: 17895
  source 1..61: mol_type = other DNA

SEQ ID NO: 17898 - DNA, 62 bp, synthetic construct
  source 1..62: mol_type = other DNA
cttcatccacgttcaccttgccccacagggcagtaacggcagacttctcctcaggagtcaga

SEQ ID NO: 17899 - DNA, 62 bp, synthetic construct; identical to SEQ ID NO: 17898
  source 1..62: mol_type = other DNA

SEQ ID NO: 17900 - DNA, 62 bp, synthetic construct
  source 1..62: mol_type = other DNA
ctgtgttcactagcaacctcaaacagacaccatggtgcatctgactcctgaggagaagtctg

SEQ ID NO: 17901 - DNA, 62 bp, synthetic construct; identical to SEQ ID NO: 17898
  source 1..62: mol_type = other DNA

SEQ ID NO: 17902 - DNA, 62 bp, synthetic construct; identical to SEQ ID NO: 17900
  source 1..62: mol_type = other DNA

SEQ ID NO: 17903 - DNA, 62 bp, synthetic construct; identical to SEQ ID NO: 17898
  source 1..62: mol_type = other DNA

SEQ ID NO: 17904 - DNA, 63 bp, synthetic construct
  source 1..63: mol_type = other DNA
cttcatccacgttcaccttgccccacagggcagtaacggcagacttctcctcaggagtcagat

SEQ ID NO: 17905 - DNA, 63 bp, synthetic construct
  source 1..63: mol_type = other DNA
ctgtgttcactagcaacctcaaacagacaccatggtgcatctgactcctgaggagaagtctgc

SEQ ID NO: 17906 - DNA, 63 bp, synthetic construct; identical to SEQ ID NO: 17904
  source 1..63: mol_type = other DNA

SEQ ID NO: 17907 - DNA, 64 bp, synthetic construct
  source 1..64: mol_type = other DNA
cttcatccacgttcaccttgccccacagggcagtaacggcagacttctcctcaggagtcagatg

SEQ ID NO: 17908 - DNA, 64 bp, synthetic construct; identical to SEQ ID NO: 17907
  source 1..64: mol_type = other DNA

SEQ ID NO: 17909 - DNA, 64 bp, synthetic construct
  source 1..64: mol_type = other DNA
ctgtgttcactagcaacctcaaacagacaccatggtgcatctgactcctgaggagaagtctgcc

SEQ ID NO: 17910 - DNA, 64 bp, synthetic construct; identical to SEQ ID NO: 17909
  source 1..64: mol_type = other DNA

SEQ ID NO: 17911 - DNA, 64 bp, synthetic construct; identical to SEQ ID NO: 17907
  source 1..64: mol_type = other DNA

SEQ ID NO: 17912 - DNA, 65 bp, synthetic construct
  source 1..65: mol_type = other DNA
cttcatccacgttcaccttgccccacagggcagtaacggcagacttctcctcaggagtcagatgc

SEQ ID NO: 17913 - DNA, 65 bp, synthetic construct
  source 1..65: mol_type = other DNA
ctgtgttcactagcaacctcaaacagacaccatggtgcatctgactcctgaggagaagtctgccg

SEQ ID NO: 17914 - DNA, 65 bp, synthetic construct; identical to SEQ ID NO: 17913
  source 1..65: mol_type = other DNA

SEQ ID NO: 17915 - DNA, 65 bp, synthetic construct; identical to SEQ ID NO: 17912
  source 1..65: mol_type = other DNA

SEQ ID NO: 17916 - DNA, 65 bp, synthetic construct; identical to SEQ ID NO: 17913
  source 1..65: mol_type = other DNA

SEQ ID NO: 17917 - DNA, 66 bp, synthetic construct
  source 1..66: mol_type = other DNA
ctgtgttcactagcaacctcaaacagacaccatggtgcatctgactcctgaggagaagtctgccgt

SEQ ID NO: 17918 - DNA, 66 bp, synthetic construct; identical to SEQ ID NO: 17917
  source 1..66: mol_type = other DNA

SEQ ID NO: 17919 - DNA, 66 bp, synthetic construct; identical to SEQ ID NO: 17917
  source 1..66: mol_type = other DNA

SEQ ID NO: 17920 - DNA, 66 bp, synthetic construct
  source 1..66: mol_type = other DNA
cttcatccacgttcaccttgccccacagggcagtaacggcagacttctcctcaggagtcagatgca

SEQ ID NO: 17921 - DNA, 67 bp, synthetic construct
  source 1..67: mol_type = other DNA
ctgtgttcactagcaacctcaaacagacaccatggtgcatctgactcctgaggagaagtctgccgtt

SEQ ID NO: 17922 - DNA, 67 bp, synthetic construct; identical to SEQ ID NO: 17921
  source 1..67: mol_type = other DNA

SEQ ID NO: 17923 - DNA, 67 bp, synthetic construct; identical to SEQ ID NO: 17921
  source 1..67: mol_type = other DNA

SEQ ID NO: 17924 - DNA, 67 bp, synthetic construct
  source 1..67: mol_type = other DNA
cttcatccacgttcaccttgccccacagggcagtaacggcagacttctcctcaggagtcagatgcac

SEQ ID NO: 17925 - DNA, 68 bp, synthetic construct
  source 1..68: mol_type = other DNA
ctgtgttcactagcaacctcaaacagacaccatggtgcatctgactcctgaggagaagtctgccgtta

SEQ ID NO: 17926 - DNA, 68 bp, synthetic construct; identical to SEQ ID NO: 17925
  source 1..68: mol_type = other DNA

SEQ ID NO: 17927 - DNA, 68 bp, synthetic construct; identical to SEQ ID NO: 17925
  source 1..68: mol_type = other DNA

SEQ ID NO: 17928 - DNA, 68 bp, synthetic construct; identical to SEQ ID NO: 17925
  source 1..68: mol_type = other DNA

SEQ ID NO: 17929 - DNA, 68 bp, synthetic construct
  source 1..68: mol_type = other DNA
cttcatccacgttcaccttgccccacagggcagtaacggcagacttctcctcaggagtcagatgcacc

SEQ ID NO: 17930 - DNA, 68 bp, synthetic construct; identical to SEQ ID NO: 17929
  source 1..68: mol_type = other DNA

SEQ ID NO: 17931 - DNA, 68 bp, synthetic construct; identical to SEQ ID NO: 17929
  source 1..68: mol_type = other DNA

SEQ ID NO: 17932 - DNA, 69 bp, synthetic construct
  source 1..69: mol_type = other DNA
ctgtgttcactagcaacctcaaacagacaccatggtgcatctgactcctgaggagaagtctgccgttac

SEQ ID NO: 17933 - DNA, 69 bp, synthetic construct; identical to SEQ ID NO: 17932
  source 1..69: mol_type = other DNA

SEQ ID NO: 17934 - DNA, 69 bp, synthetic construct; identical to SEQ ID NO: 17932
  source 1..69: mol_type = other DNA

SEQ ID NO: 17935 - DNA, 69 bp, synthetic construct; identical to SEQ ID NO: 17932
  source 1..69: mol_type = other DNA

SEQ ID NO: 17936 - DNA, 69 bp, synthetic construct
  source 1..69: mol_type = other DNA
cttcatccacgttcaccttgccccacagggcagtaacggcagacttctcctcaggagtcagatgcacca

SEQ ID NO: 17937 - DNA, 69 bp, synthetic construct; identical to SEQ ID NO: 17936
  source 1..69: mol_type = other DNA

SEQ ID NO: 17938 - DNA, 69 bp, synthetic construct; identical to SEQ ID NO: 17932
  source 1..69: mol_type = other DNA

SEQ ID NO: 17939 - DNA, 69 bp, synthetic construct; identical to SEQ ID NO: 17932
  source 1..69: mol_type = other DNA

SEQ ID NO: 17940 - DNA, 70 bp, synthetic construct
  source 1..70: mol_type = other DNA
ctgtgttcactagcaacctcaaacagacaccatggtgcatctgactcctgaggagaagtctgccgttact

SEQ ID NO: 17941 - DNA, 70 bp, synthetic construct
  source 1..70: mol_type = other DNA
cttcatccacgttcaccttgccccacagggcagtaacggcagacttctcctcaggagtcagatgcaccat

SEQ ID NO: 17942 - DNA, 70 bp, synthetic construct; identical to SEQ ID NO: 17941
  source 1..70: mol_type = other DNA

SEQ ID NO: 17943 - DNA, 70 bp, synthetic construct; identical to SEQ ID NO: 17940
  source 1..70: mol_type = other DNA

SEQ ID NO: 17944 - DNA, 71 bp, synthetic construct
  source 1..71: mol_type = other DNA
cttcatccacgttcaccttgccccacagggcagtaacggcagacttctcctcaggagtcagatgcaccatg

SEQ ID NO: 17945 - DNA, 71 bp, synthetic construct
  source 1..71: mol_type = other DNA
ctgtgttcactagcaacctcaaacagacaccatggtgcatctgactcctgaggagaagtctgccgttactg

SEQ ID NO: 17946 - DNA, 71 bp, synthetic construct; identical to SEQ ID NO: 17944
  source 1..71: mol_type = other DNA

SEQ ID NO: 17947 - DNA, 71 bp, synthetic construct; identical to SEQ ID NO: 17944
  source 1..71: mol_type = other DNA

SEQ ID NO: 17948 - DNA, 72 bp, synthetic construct
  source 1..72: mol_type = other DNA
cttcatccacgttcaccttgccccacagggcagtaacggcagacttctcctcaggagtcagatgcaccatgg

SEQ ID NO: 17949 - DNA, 72 bp, synthetic construct; identical to SEQ ID NO: 17948
  source 1..72: mol_type = other DNA

SEQ ID NO: 17950 - DNA, 72 bp, synthetic construct; identical to SEQ ID NO: 17948
  source 1..72: mol_type = other DNA

SEQ ID NO: 17951 - DNA, 72 bp, synthetic construct; identical to SEQ ID NO: 17948
  source 1..72: mol_type = other DNA

SEQ ID NO: 17952 - DNA, 72 bp, synthetic construct
  source 1..72: mol_type = other DNA
ctgtgttcactagcaacctcaaacagacaccatggtgcatctgactcctgaggagaagtctgccgttactgc

SEQ ID NO: 17953 - DNA, 72 bp, synthetic construct; identical to SEQ ID NO: 17952
  source 1..72: mol_type = other DNA

SEQ ID NO: 17954 - DNA, 73 bp, synthetic construct
  source 1..73: mol_type = other DNA
ctgtgttcactagcaacctcaaacagacaccatggtgcatctgactcctgaggagaagtctgccgttactgcc

SEQ ID NO: 17955 - DNA, 73 bp, synthetic construct
  source 1..73: mol_type = other DNA
cttcatccacgttcaccttgccccacagggcagtaacggcagacttctcctcaggagtcagatgcaccatggt

SEQ ID NO: 17956 - DNA, 73 bp, synthetic construct; identical to SEQ ID NO: 17955
  source 1..73: mol_type = other DNA

SEQ ID NO: 17957 - DNA, 73 bp, synthetic construct; identical to SEQ ID NO: 17955
  source 1..73: mol_type = other DNA

SEQ ID NO: 17958 - DNA, 73 bp, synthetic construct; identical to SEQ ID NO: 17955
  source 1..73: mol_type = other DNA

SEQ ID NO: 17959 - DNA, 73 bp, synthetic construct; identical to SEQ ID NO: 17954
  source 1..73: mol_type = other DNA

SEQ ID NO: 17960 - DNA, 73 bp, synthetic construct; identical to SEQ ID NO: 17954
  source 1..73: mol_type = other DNA

SEQ ID NO: 17961 - DNA, 74 bp, synthetic construct
  source 1..74: mol_type = other DNA
cttcatccacgttcaccttgccccacagggcagtaacggcagacttctcctcaggagtcagatgcaccatggtg

SEQ ID NO: 17962 - DNA, 74 bp, synthetic construct; identical to SEQ ID NO: 17961
  source 1..74: mol_type = other DNA

SEQ ID NO: 17963 - DNA, 74 bp, synthetic construct
  source 1..74: mol_type = other DNA
ctgtgttcactagcaacctcaaacagacaccatggtgcatctgactcctgaggagaagtctgccgttactgccc

SEQ ID NO: 17964 - DNA, 74 bp, synthetic construct; identical to SEQ ID NO: 17963
  source 1..74: mol_type = other DNA

SEQ ID NO: 17965 - DNA, 74 bp, synthetic construct; identical to SEQ ID NO: 17961
  source 1..74: mol_type = other DNA

SEQ ID NO: 17966 - DNA, 75 bp, synthetic construct
  source 1..75: mol_type = other DNA
ctgtgttcactagcaacctcaaacagacaccatggtgcatctgactcctgaggagaagtctgccgttactgccct

SEQ ID NO: 17967 - DNA, 75 bp, synthetic construct; identical to SEQ ID NO: 17966
  source 1..75: mol_type = other DNA

SEQ ID NO: 17968 - DNA, 75 bp, synthetic construct
  source 1..75: mol_type = other DNA
cttcatccacgttcaccttgccccacagggcagtaacggcagacttctcctcaggagtcagatgcaccatggtgt

SEQ ID NO: 17969 - DNA, 76 bp, synthetic construct
  source 1..76: mol_type = other DNA
ctgtgttcactagcaacctcaaacagacaccatggtgcatctgactcctgaggagaagtctgccgttactgccctg

SEQ ID NO: 17970 - DNA, 76 bp, synthetic construct; identical to SEQ ID NO: 17969
  source 1..76: mol_type = other DNA

SEQ ID NO: 17971 - DNA, 76 bp, synthetic construct; identical to SEQ ID NO: 17969
  source 1..76: mol_type = other DNA

SEQ ID NO: 17972 - DNA, 76 bp, synthetic construct; identical to SEQ ID NO: 17969
  source 1..76: mol_type = other DNA

SEQ ID NO: 17973 - DNA, 76 bp, synthetic construct
  source 1..76: mol_type = other DNA
cttcatccacgttcaccttgccccacagggcagtaacggcagacttctcctcaggagtcagatgcaccatggtgtc

SEQ ID NO: 17974 - DNA, 77 bp, synthetic construct
  source 1..77: mol_type = other DNA
ctgtgttcactagcaacctcaaacagacaccatggtgcatctgactcctgaggagaagtctgccgttactgccctgt

SEQ ID NO: 17975 - DNA, 77 bp, synthetic construct; identical to SEQ ID NO: 17974
  source 1..77: mol_type = other DNA

SEQ ID NO: 17976 - DNA, 77 bp, synthetic construct; identical to SEQ ID NO: 17974
  source 1..77: mol_type = other DNA

SEQ ID NO: 17977 - DNA, 77 bp, synthetic construct; identical to SEQ ID NO: 17974
  source 1..77: mol_type = other DNA

SEQ ID NO: 17978 - DNA, 77 bp, synthetic construct
  source 1..77: mol_type = other DNA
cttcatccacgttcaccttgccccacagggcagtaacggcagacttctcctcaggagtcagatgcaccatggtgtct

SEQ ID NO: 17979 - DNA, 78 bp, synthetic construct
  source 1..78: mol_type = other DNA
ctgtgttcactagcaacctcaaacagacaccatggtgcatctgactcctgaggagaagtctgccgttactgccctgtg

SEQ ID NO: 17980 - DNA, 78 bp, synthetic construct; identical to SEQ ID NO: 17979
  source 1..78: mol_type = other DNA

SEQ ID NO: 17981 - DNA, 78 bp, synthetic construct; identical to SEQ ID NO: 17979
  source 1..78: mol_type = other DNA

SEQ ID NO: 17982 - DNA, 78 bp, synthetic construct; identical to SEQ ID NO: 17979
  source 1..78: mol_type = other DNA

SEQ ID NO: 17983 - DNA, 78 bp, synthetic construct; identical to SEQ ID NO: 17979
  source 1..78: mol_type = other DNA

SEQ ID NO: 17984 - DNA, 78 bp, synthetic construct; identical to SEQ ID NO: 17979
  source 1..78: mol_type = other DNA

SEQ ID NO: 17985 - DNA, 78 bp, synthetic construct
  source 1..78: mol_type = other DNA
cttcatccacgttcaccttgccccacagggcagtaacggcagacttctcctcaggagtcagatgcaccatggtgtctg

SEQ ID NO: 17986 - DNA, 78 bp, synthetic construct; identical to SEQ ID NO: 17979
  source 1..78: mol_type = other DNA

SEQ ID NO: 17987 - DNA, 78 bp, synthetic construct; identical to SEQ ID NO: 17985
  source 1..78: mol_type = other DNA

SEQ ID NO: 17988 - DNA, 78 bp, synthetic construct; identical to SEQ ID NO: 17979
  source 1..78: mol_type = other DNA

SEQ ID NO: 17989 - DNA, 78 bp, synthetic construct; identical to SEQ ID NO: 17985
  source 1..78: mol_type = other DNA

SEQ ID NO: 17990 - DNA, 79 bp, synthetic construct
  source 1..79: mol_type = other DNA
cttcatccacgttcaccttgccccacagggcagtaacggcagacttctcctcaggagtcagatgcaccatggtgtctgt

SEQ ID NO: 17991 - DNA, 79 bp, synthetic construct
  source 1..79: mol_type = other DNA
ctgtgttcactagcaacctcaaacagacaccatggtgcatctgactcctgaggagaagtctgccgttactgccctgtgg

SEQ ID NO: 17992 - DNA, 79 bp, synthetic construct; identical to SEQ ID NO: 17991
  source 1..79: mol_type = other DNA

SEQ ID NO: 17993 - DNA, 79 bp, synthetic construct; identical to SEQ ID NO: 17991
  source 1..79: mol_type = other DNA

SEQ ID NO: 17994 - DNA, 79 bp, synthetic construct; identical to SEQ ID NO: 17991
  source 1..79: mol_type = other DNA

SEQ ID NO: 17995 - DNA, 79 bp, synthetic construct; identical to SEQ ID NO: 17991
  source 1..79: mol_type = other DNA

SEQ ID NO: 17996 - DNA, 79 bp, synthetic construct; identical to SEQ ID NO: 17991
  source 1..79: mol_type = other DNA

SEQ ID NO: 17997 - DNA, 79 bp, synthetic construct; identical to SEQ ID NO: 17990
  source 1..79: mol_type = other DNA

SEQ ID NO: 17998 - DNA, 79 bp, synthetic construct; identical to SEQ ID NO: 17990
  source 1..79: mol_type = other DNA

SEQ ID NO: 17999 - DNA, 79 bp, synthetic construct; identical to SEQ ID NO: 17990
  source 1..79: mol_type = other DNA

SEQ ID NO: 18000 - DNA, 80 bp, synthetic construct
  source 1..80: mol_type = other DNA
ctgtgttcactagcaacctcaaacagacaccatggtgcatctgactcctgaggagaagtctgccgttactgccctgtggg

SEQ ID NO: 18001 - DNA, 80 bp, synthetic construct; identical to SEQ ID NO: 18000
  source 1..80: mol_type = other DNA

SEQ ID NO: 18002 - DNA, 80 bp, synthetic construct
  source 1..80: mol_type = other DNA
cttcatccacgttcaccttgccccacagggcagtaacggcagacttctcctcaggagtcagatgcaccatggtgtctgtt

SEQ ID NO: 18003 - DNA, 80 bp, synthetic construct; identical to SEQ ID NO: 18002
  source 1..80: mol_type = other DNA

SEQ ID NO: 18004 - DNA, 80 bp, synthetic construct; identical to SEQ ID NO: 18000
  source 1..80: mol_type = other DNA

SEQ ID NO: 18005 - DNA, 81 bp, synthetic construct
  source 1..81: mol_type = other DNA
ctgtgttcactagcaacctcaaacagacaccatggtgcatctgactcctgaggagaagtctgccgttactgccctgtgggg

SEQ ID NO: 18006 - DNA, 81 bp, synthetic construct
  source 1..81: mol_type = other DNA
cttcatccacgttcaccttgccccacagggcagtaacggcagacttctcctcaggagtcagatgcaccatggtgtctgttt

SEQ ID NO: 18007 - DNA, 81 bp, synthetic construct; identical to SEQ ID NO: 18006
  source 1..81: mol_type = other DNA

SEQ ID NO: 18008 - DNA, 81 bp, synthetic construct; identical to SEQ ID NO: 18005
  source 1..81: mol_type = other DNA

SEQ ID NO: 18009 - DNA, 81 bp, synthetic construct; identical to SEQ ID NO: 18006
  source 1..81: mol_type = other DNA

SEQ ID NO: 18010 - DNA, 17 bp, synthetic construct
  source 1..17: mol_type = other DNA
caggagtcagatgcacc

SEQ ID NO: 18011 - DNA, 17 bp, synthetic construct
  source 1..17: mol_type = other DNA
caggagtcagatgcacc

SEQ ID NO: 18012 - DNA, 17 bp, synthetic construct
  source 1..17: mol_type = other DNA
caggagtcagatgcacc

SEQ ID NO: 18013 - DNA, 17 bp, synthetic construct
  source 1..17: mol_type = other DNA
caggagtcagatgcacc

SEQ ID NO: 18014 - DNA, 17 bp, synthetic construct
  source 1..17: mol_type = other DNA
aggagtcagatgcacca

SEQ ID NO: 18015 - DNA, 17 bp, synthetic construct
  source 1..17: mol_type = other DNA
aggagtcagatgcacca

SEQ ID NO: 18016 - DNA, 17 bp, synthetic construct
  source 1..17: mol_type = other DNA
gagaagtctgccgttac

SEQ ID NO: 18017 - DNA, 17 bp, synthetic construct
  source 1..17: mol_type = other DNA
gagaagtctgccgttac

SEQ ID NO: 18018 - DNA, 17 bp, synthetic construct
  source 1..17: mol_type = other DNA
gagaagtctgccgttac

SEQ ID NO: 18019 - DNA, 17 bp, synthetic construct
  source 1..17: mol_type = other DNA
gagaagtctgccgttac

SEQ ID NO: 18020 - DNA, 17 bp, synthetic construct
  source 1..17: mol_type = other DNA
aggagtcagatgcacca

SEQ ID NO: 18021 - DNA, 17 bp, synthetic construct
  source 1..17: mol_type = other DNA
aggagtcagatgcacca

SEQ ID NO: 18022 - DNA, 17 bp, synthetic construct
  source 1..17: mol_type = other DNA
gagaagtctgccgttac

SEQ ID NO: 18023 - DNA, 17 bp, synthetic construct
  source 1..17: mol_type = other DNA
gagaagtctgccgttac

SEQ ID NO: 18024 - DNA, 17 bp, synthetic construct
  source 1..17: mol_type = other DNA
gagaagtctgccgttac

SEQ ID NO: 18025 - DNA, 17 bp, synthetic construct
  source 1..17: mol_type = other DNA
gagaagtctgccgttac

SEQ ID NO: 18026 - DNA, 17 bp, synthetic construct
  source 1..17: mol_type = other DNA
agaagtctgccgttact

SEQ ID NO: 18027 - DNA, 17 bp, synthetic construct
  source 1..17: mol_type = other DNA
agaagtctgccgttact

SEQ ID NO: 18028 - DNA, 17 bp, synthetic construct
  source 1..17: mol_type = other DNA
ggagtcagatgcaccat

SEQ ID NO: 18029 - DNA, 17 bp, synthetic construct
  source 1..17: mol_type = other DNA
agaagtctgccgttact

SEQ ID NO: 18030 - DNA, 17 bp, synthetic construct
  source 1..17: mol_type = other DNA
agaagtctgccgttact

SEQ ID NO: 18031 - DNA, 17 bp, synthetic construct
  source 1..17: mol_type = other DNA
ggagtcagatgcaccat

SEQ ID NO: 18032 - DNA, 17 bp, synthetic construct
  source 1..17: mol_type = other DNA
agaagtctgccgttact

SEQ ID NO: 18033 - DNA, 17 bp, synthetic construct
  source 1..17: mol_type = other DNA
agaagtctgccgttact

SEQ ID NO: 18034 - DNA, 17 bp, synthetic construct
  source 1..17: mol_type = other DNA
ggagtcagatgcaccat

SEQ ID NO: 18035 - DNA, 17 bp, synthetic construct
  source 1..17: mol_type = other DNA
ggagtcagatgcaccat

SEQ ID NO: 18036 - DNA, 17 bp, synthetic construct
  source 1..17: mol_type = other DNA
gagtcagatgcaccatg

SEQ ID NO: 18037 - DNA, 17 bp, synthetic construct
  source 1..17: mol_type = other DNA
gagtcagatgcaccatg

SEQ ID NO: 18038 - DNA, 17 bp, synthetic construct
  source 1..17: mol_type = other DNA
gaagtctgccgttactg

SEQ ID NO: 18039 - DNA, 17 bp, synthetic construct
  source 1..17: mol_type = other DNA
gaagtctgccgttactg

SEQ ID NO: 18040 - DNA, 17 bp, synthetic construct
  source 1..17: mol_type = other DNA
gagtcagatgcaccatg

SEQ ID NO: 18041 - DNA, 17 bp, synthetic construct
  source 1..17: mol_type = other DNA
gagtcagatgcaccatg

SEQ ID NO: 18042 - DNA, 17 bp, synthetic construct
  source 1..17: mol_type = other DNA
gagtcagatgcaccatg

SEQ ID NO: 18043 - DNA, 17 bp, synthetic construct
  source 1..17: mol_type = other DNA
gagtcagatgcaccatg

SEQ ID NO: 18044 - DNA, 17 bp, synthetic construct
  source 1..17: mol_type = other DNA
gaagtctgccgttactg

SEQ ID NO: 18045 - DNA, 17 bp, synthetic construct
  source 1..17: mol_type = other DNA
agtcagatgcaccatgg

SEQ ID NO: 18046 - DNA, 17 bp, synthetic construct
  source 1..17: mol_type = other DNA
agtcagatgcaccatgg

SEQ ID NO: 18047 - DNA, 17 bp, synthetic construct
  source 1..17: mol_type = other DNA
aagtctgccgttactgc

SEQ ID NO: 18048 - DNA, 17 bp, synthetic construct
  source 1..17: mol_type = other DNA
agtcagatgcaccatgg

SEQ ID NO: 18049 - DNA, 17 bp, synthetic construct
  source 1..17: mol_type = other DNA
agtcagatgcaccatgg

SEQ ID NO: 18050 - DNA, 17 bp, synthetic construct
  source 1..17: mol_type = other DNA
agtcagatgcaccatgg

SEQ ID NO: 18051 - DNA, 17 bp, synthetic construct
  source 1..17: mol_type = other DNA
agtcagatgcaccatgg

SEQ ID NO: 18052 - DNA, 17 bp, synthetic construct
  source 1..17: mol_type = other DNA
aagtctgccgttactgc

SEQ ID NO: 18053 - DNA, 17 bp, synthetic construct
  source 1..17: mol_type = other DNA
gtcagatgcaccatggt

SEQ ID NO: 18054 - DNA, 17 bp, synthetic construct
  source 1..17: mol_type = other DNA
gtcagatgcaccatggt

SEQ ID NO: 18055 - DNA, 17 bp, synthetic construct
  source 1..17: mol_type = other DNA
gtcagatgcaccatggt

SEQ ID NO: 18056 - DNA, 17 bp, synthetic construct
  source 1..17: mol_type = other DNA
agtctgccgttactgcc

SEQ ID NO: 18057 - DNA, 17 bp, synthetic construct
  source 1..17: mol_type = other DNA
tcagatgcaccatggtg

SEQ ID NO: 18058 - DNA, 17 bp, synthetic construct
  source 1..17: mol_type = other DNA
tcagatgcaccatggtg

SEQ ID NO: 18059 - DNA, 17 bp, synthetic construct
  source 1..17: mol_type = other DNA
gtctgccgttactgccc

SEQ ID NO: 18060 - DNA, 17 bp, synthetic construct
  source 1..17: mol_type = other DNA
gtctgccgttactgccc

SEQ ID NO: 18061 - DNA, 17 bp, synthetic construct
  source 1..17: mol_type = other DNA
gtctgccgttactgccc

SEQ ID NO: 18062 - DNA, 17 bp, synthetic construct
  source 1..17: mol_type = other DNA
tctgccgttactgccct

SEQ ID NO: 18063 - DNA, 17 bp, synthetic construct
  source 1..17: mol_type = other DNA
cagatgcaccatggtgt

SEQ ID NO: 18064 - DNA, 17 bp, synthetic construct
  source 1..17: mol_type = other DNA
ctgccgttactgccctg

SEQ ID NO: 18065 - DNA, 17 bp, synthetic construct
  source 1..17: mol_type = other DNA
agatgcaccatggtgtc

SEQ ID NO: 18066 - DNA, 17 bp, synthetic construct
  source 1..17: mol_type = other DNA
ctgccgttactgccctg

SEQ ID NO: 18067 - DNA, 17 bp, synthetic construct
  source 1..17: mol_type = other DNA
tgccgttactgccctgt

SEQ ID NO: 18068 - DNA, 17 bp, synthetic construct
  source 1..17: mol_type = other DNA
tgccgttactgccctgt

SEQ ID NO: 18069 - DNA, 17 bp, synthetic construct
  source 1..17: mol_type = other DNA
gatgcaccatggtgtct

SEQ ID NO: 18070 - DNA, 17 bp, synthetic construct
  source 1..17: mol_type = other DNA
tgccgttactgccctgt

SEQ ID NO: 18071 - DNA, 17 bp, synthetic construct
  source 1..17: mol_type = other DNA
gccgttactgccctgtg

SEQ ID NO: 18072 - DNA, 17 bp, synthetic construct
  source 1..17: mol_type = other DNA
atgcaccatggtgtctg

SEQ ID NO: 18073 - DNA, 17 bp, synthetic construct
  source 1..17: mol_type = other DNA
atgcaccatggtgtctg

SEQ ID NO: 18074 - DNA, 17 bp, synthetic construct
  source 1..17: mol_type = other DNA
atgcaccatggtgtctg

SEQ ID NO: 18075 - DNA, 17 bp, synthetic construct
  source 1..17: mol_type = other DNA
tgcaccatggtgtctgt

SEQ ID NO: 18076 - DNA, 17 bp, synthetic construct
  source 1..17: mol_type = other DNA
tgcaccatggtgtctgt

SEQ ID NO: 18077 - DNA, 17 bp, synthetic construct
  source 1..17: mol_type = other DNA
ccgttactgccctgtgg

SEQ ID NO: 18078 - DNA, 17 bp, synthetic construct
  source 1..17: mol_type = other DNA
tgcaccatggtgtctgt

SEQ ID NO: 18079 - DNA, 17 bp, synthetic construct
  source 1..17: mol_type = other DNA
ccgttactgccctgtgg

SEQ ID NO: 18080 - DNA, 17 bp, synthetic construct
  source 1..17: mol_type = other DNA
tgcaccatggtgtctgt

SEQ ID NO: 18081 - DNA, 17 bp, synthetic construct
  source 1..17: mol_type = other DNA
gcaccatggtgtctgtt

SEQ ID NO: 18082 - DNA, 17 bp, synthetic construct
  source 1..17: mol_type = other DNA
cgttactgccctgtggg

SEQ ID NO: 18083 - DNA, 17 bp, synthetic construct
  source 1..17: mol_type = other DNA
gcaccatggtgtctgtt

SEQ ID NO: 18084 - DNA, 17 bp, synthetic construct
  source 1..17: mol_type = other DNA
caccatggtgtctgttt

SEQ ID NO: 18085 - DNA, 17 bp, synthetic construct
  source 1..17: mol_type = other DNA
caccatggtgtctgttt

SEQ ID NO: 18086 - DNA, 17 bp, synthetic construct
  source 1..17: mol_type = other DNA
gttactgccctgtgggg

SEQ ID NO: 18087 - DNA, 17 bp, synthetic construct
  source 1..17: mol_type = other DNA
gttactgccctgtgggg

SEQ ID NO: 18088 - DNA, 17 bp, synthetic construct
  source 1..17: mol_type = other DNA
caccatggtgtctgttt

SEQ ID NO: 18089 - DNA, 17 bp, synthetic construct
  source 1..17: mol_type = other DNA
accatggtgtctgtttg

SEQ ID NO: 18090 - DNA, 17 bp, synthetic construct
  source 1..17: mol_type = other DNA
ttactgccctgtggggc

SEQ ID NO: 18091 - DNA, 17 bp, synthetic construct
  source 1..17: mol_type = other DNA
ttactgccctgtggggc

SEQ ID NO: 18092 - DNA, 17 bp, synthetic construct
  source 1..17: mol_type = other DNA
accatggtgtctgtttg

SEQ ID NO: 18093 - DNA, 17 bp, synthetic construct
  source 1..17: mol_type = other DNA
ttactgccctgtggggc

SEQ ID NO: 18094 - DNA, 17 bp, synthetic construct
  source 1..17: mol_type = other DNA
tactgccctgtggggca

SEQ ID NO: 18095 - DNA, 17 bp, synthetic construct
  source 1..17: mol_type = other DNA
tactgccctgtggggca

SEQ ID NO: 18096 - DNA, 17 bp, synthetic construct
  source 1..17: mol_type = other DNA
tactgccctgtggggca

SEQ ID NO: 18097 - DNA, 17 bp, synthetic construct
  source 1..17: mol_type = other DNA
ccatggtgtctgtttga

SEQ ID NO: 18098 - DNA, 17 bp, synthetic construct
  source 1..17: mol_type = other DNA
actgccctgtggggcaa

SEQ ID NO: 18099 - DNA, 17 bp, synthetic construct
  source 1..17: mol_type = other DNA
actgccctgtggggcaa

SEQ ID NO: 18100 - DNA, 17 bp, synthetic construct
  source 1..17: mol_type = other DNA
actgccctgtggggcaa

SEQ ID NO: 18101 - DNA, 17 bp, synthetic construct
  source 1..17: mol_type = other DNA
catggtgtctgtttgag

SEQ ID NO: 18102 - DNA, 17 bp, synthetic construct
  source 1..17: mol_type = other DNA
ctgccctgtggggcaag

SEQ ID NO: 18103 - DNA, 17 bp, synthetic construct
  source 1..17: mol_type = other DNA
ctgccctgtggggcaag

SEQ ID NO: 18104 - DNA, 17 bp, synthetic construct
  source 1..17: mol_type = other DNA
ctgccctgtggggcaag

SEQ ID NO: 18105 - DNA, 17 bp, synthetic construct
  source 1..17: mol_type = other DNA
ctgccctgtggggcaag

SEQ ID NO: 18106 - DNA, 17 bp, synthetic construct
  source 1..17: mol_type = other DNA
atggtgtctgtttgagg

SEQ ID NO: 18107 - DNA, 17 bp, synthetic construct
  source 1..17: mol_type = other DNA
atggtgtctgtttgagg

SEQ ID NO: 18108 - DNA, 17 bp, synthetic construct
  source 1..17: mol_type = other DNA
atggtgtctgtttgagg

SEQ ID NO: 18109 - DNA, 17 bp, synthetic construct
  source 1..17: mol_type = other DNA
tgccctgtggggcaagg

SEQ ID NO: 18110 - DNA, 17 bp, synthetic construct
  source 1..17: mol_type = other DNA
tgccctgtggggcaagg

SEQ ID NO: 18111 - DNA, 17 bp, synthetic construct
  source 1..17: mol_type = other DNA
tgccctgtggggcaagg

SEQ ID NO: 18112 - DNA, 17 bp, synthetic construct
  source 1..17: mol_type = other DNA
tgccctgtggggcaagg

SEQ ID NO: 18113 - DNA, 17 bp, synthetic construct
  source 1..17: mol_type = other DNA
tggtgtctgtttgaggt

SEQ ID NO: 18114 - DNA, 17 bp, synthetic construct
  source 1..17: mol_type = other DNA
tggtgtctgtttgaggt

SEQ ID NO: 18115 - DNA, 17 bp, synthetic construct
  source 1..17: mol_type = other DNA
tgccctgtggggcaagg

SEQ ID NO: 18116 - DNA, 17 bp, synthetic construct
  source 1..17: mol_type = other DNA
tgccctgtggggcaagg

SEQ ID NO: 18117 - DNA, 17 bp, synthetic construct
  source 1..17: mol_type = other DNA
gccctgtggggcaaggt

SEQ ID NO: 18118 - DNA, 17 bp, synthetic construct
  source 1..17: mol_type = other DNA
ggtgtctgtttgaggtt

SEQ ID NO: 18119 - DNA, 17 bp, synthetic construct
  source 1..17: mol_type = other DNA
ggtgtctgtttgaggtt

SEQ ID NO: 18120 - DNA, 17 bp, synthetic construct
  source 1..17: mol_type = other DNA
gccctgtggggcaaggt

SEQ ID NO: 18121 - DNA, 17 bp, synthetic construct
  source 1..17: mol_type = other DNA
gtgtctgtttgaggttg

SEQ ID NO: 18122 - DNA, 17 bp, synthetic construct
  source 1..17: mol_type = other DNA
ccctgtggggcaaggtg

SEQ ID NO: 18123 - DNA, 17 bp, synthetic construct
  source 1..17: mol_type = other DNA
gtgtctgtttgaggttg

SEQ ID NO: 18124 - DNA, 17 bp, synthetic construct
  source 1..17: mol_type = other DNA
gtgtctgtttgaggttg

SEQ ID NO: 18125 - DNA, 17 bp, synthetic construct
  source 1..17: mol_type = other DNA
tgtctgtttgaggttgc

SEQ ID NO: 18126 - DNA, 17 bp, synthetic construct
  source 1..17: mol_type = other DNA
tgtctgtttgaggttgc

SEQ ID NO: 18127 - DNA, 17 bp, synthetic construct
  source 1..17: mol_type = other DNA
tgtctgtttgaggttgc

SEQ ID NO: 18128 - DNA, 17 bp, synthetic construct
  source 1..17: mol_type = other DNA
tgtctgtttgaggttgc

SEQ ID NO: 18129 - DNA, 17 bp, synthetic construct
  source 1..17: mol_type = other DNA
cctgtggggcaaggtga

SEQ ID NO: 18130 - DNA, 17 bp, synthetic construct
  source 1..17: mol_type = other DNA
cctgtggggcaaggtga

SEQ ID NO: 18131 - DNA, 17 bp, synthetic construct
  source 1..17: mol_type = other DNA
ctgtggggcaaggtgaa

SEQ ID NO: 18132 - DNA, 17 bp, synthetic construct
  source 1..17: mol_type = other DNA
gtctgtttgaggttgct

SEQ ID NO: 18133 - DNA, 17 bp, synthetic construct
  source 1..17: mol_type = other DNA
gtctgtttgaggttgct

SEQ ID NO: 18134 - DNA, 17 bp, synthetic construct
  source 1..17: mol_type = other DNA
gtctgtttgaggttgct

SEQ ID NO: 18135 - DNA, 17 bp, synthetic construct
  source 1..17: mol_type = other DNA
gtctgtttgaggttgct

SEQ ID NO: 18136 - DNA, 17 bp, synthetic construct
  source 1..17: mol_type = other DNA
ctgtggggcaaggtgaa

SEQ ID NO: 18137 - DNA, 17 bp, synthetic construct
  source 1..17: mol_type = other DNA
ctgtggggcaaggtgaa

SEQ ID NO: 18138 - DNA, 17 bp, synthetic construct
  source 1..17: mol_type = other DNA
tctgtttgaggttgcta

SEQ ID NO: 18139 - DNA, 17 bp, synthetic construct
  source 1..17: mol_type = other DNA
tctgtttgaggttgcta

SEQ ID NO: 18140 - DNA, 17 bp, synthetic construct
  source 1..17: mol_type = other DNA
tgtggggcaaggtgaac

SEQ ID NO: 18141 - DNA, 17 bp, synthetic construct
  source 1..17: mol_type = other DNA
tgtggggcaaggtgaac

SEQ ID NO: 18142 - DNA, 17 bp, synthetic construct
  source 1..17: mol_type = other DNA
tctgtttgaggttgcta

SEQ ID NO: 18143 - DNA, 17 bp, synthetic construct
  source 1..17: mol_type = other DNA
gtggggcaaggtgaacg

SEQ ID NO: 18144 - DNA, 17 bp, synthetic construct
  source 1..17: mol_type = other DNA
gtggggcaaggtgaacg

SEQ ID NO: 18145 - DNA, 17 bp, synthetic construct
  source 1..17: mol_type = other DNA
ctgtttgaggttgctag

SEQ ID NO: 18146 - DNA, 17 bp, synthetic construct
  source 1..17: mol_type = other DNA
tggggcaaggtgaacgt

SEQ ID NO: 18147 - DNA, 17 bp, synthetic construct
  source 1..17: mol_type = other DNA
tggggcaaggtgaacgt

SEQ ID NO: 18148 - DNA, 17 bp, synthetic construct
  source 1..17: mol_type = other DNA
tggggcaaggtgaacgt

SEQ ID NO: 18149 - DNA, 17 bp, synthetic construct
  source 1..17: mol_type = other DNA
tggggcaaggtgaacgt

SEQ ID NO: 18150 - DNA, 17 bp, synthetic construct
  source 1..17: mol_type = other DNA
tgtttgaggttgctagt

SEQ ID NO: 18151 - DNA, 17 bp, synthetic construct
  source 1..17: mol_type = other DNA
ggggcaaggtgaacgtg

SEQ ID NO: 18152 - DNA, 17 bp, synthetic construct
  source 1..17: mol_type = other DNA
ggggcaaggtgaacgtg

SEQ ID NO: 18153 - DNA, 17 bp, synthetic construct
  source 1..17: mol_type = other DNA
ggggcaaggtgaacgtg

SEQ ID NO: 18154 - DNA, 17 bp, synthetic construct
  source 1..17: mol_type = other DNA
ggggcaaggtgaacgtg

SEQ ID NO: 18155 - DNA, 17 bp, synthetic construct
  source 1..17: mol_type = other DNA
gtttgaggttgctagtg

SEQ ID NO: 18156 - DNA, 17 bp, synthetic construct
  source 1..17: mol_type = other DNA
gggcaaggtgaacgtgg

SEQ ID NO: 18157 - DNA, 17 bp, synthetic construct
  source 1..17: mol_type = other DNA
gggcaaggtgaacgtgg

SEQ ID NO: 18158 - DNA, 17 bp, synthetic construct
  source 1..17: mol_type = other DNA
gggcaaggtgaacgtgg

SEQ ID NO: 18159 - DNA, 17 bp, synthetic construct
  source 1..17: mol_type = other DNA
gggcaaggtgaacgtgg

SEQ ID NO: 18160 - DNA, 17 bp, synthetic construct
  source 1..17: mol_type = other DNA
gggcaaggtgaacgtgg

SEQ ID NO: 18161 - DNA, 17 bp, synthetic construct
  source 1..17: mol_type = other DNA
gggcaaggtgaacgtgg

SEQ ID NO: 18162 - DNA, 17 bp, synthetic construct
  source 1..17: mol_type = other DNA
tttgaggttgctagtga

SEQ ID NO: 18163 - DNA, 17 bp, synthetic construct
  source 1..17: mol_type = other DNA
gggcaaggtgaacgtgg

SEQ ID NO: 18164 - DNA, 17 bp, synthetic construct
  source 1..17: mol_type = other DNA
tttgaggttgctagtga

SEQ ID NO: 18165 - DNA, 17 bp, synthetic construct
  source 1..17: mol_type = other DNA
gggcaaggtgaacgtgg

SEQ ID NO: 18166 - DNA, 17 bp, synthetic construct
  source 1..17: mol_type = other DNA
tttgaggttgctagtga

SEQ ID NO: 18167 - DNA, 17 bp, synthetic construct
  source 1..17: mol_type = other DNA
ttgaggttgctagtgaa

SEQ ID NO: 18168 - DNA, 17 bp, synthetic construct
  source 1..17: mol_type = other DNA
ggcaaggtgaacgtgga

SEQ ID NO: 18169 - DNA, 17 bp, synthetic construct
  source 1..17: mol_type = other DNA
ggcaaggtgaacgtgga

SEQ ID NO: 18170 - DNA, 17 bp, synthetic construct
  source 1..17: mol_type = other DNA
ggcaaggtgaacgtgga

SEQ ID NO: 18171 - DNA, 17 bp, synthetic construct
  source 1..17: mol_type = other DNA
ggcaaggtgaacgtgga

SEQ ID NO: 18172 - DNA, 17 bp, synthetic construct
  source 1..17: mol_type = other DNA
ggcaaggtgaacgtgga

SEQ ID NO: 18173 - DNA, 17 bp, synthetic construct
  source 1..17: mol_type = other DNA
ggcaaggtgaacgtgga

SEQ ID NO: 18174 - DNA, 17 bp, synthetic construct
  source 1..17: mol_type = other DNA
ttgaggttgctagtgaa

SEQ ID NO: 18175 - DNA, 17 bp, synthetic construct
  source 1..17: mol_type = other DNA
ttgaggttgctagtgaa

SEQ ID NO: 18176 - DNA, 17 bp, synthetic construct
  source 1..17: mol_type = other DNA
ttgaggttgctagtgaa

SEQ ID NO: 18177 - DNA, 17 bp, synthetic construct
  source 1..17: mol_type = other DNA
gcaaggtgaacgtggat

SEQ ID NO: 18178 - DNA, 17 bp, synthetic construct
  source 1..17: mol_type = other DNA
gcaaggtgaacgtggat

SEQ ID NO: 18179 - DNA, 17 bp, synthetic construct
  source 1..17: mol_type = other DNA
tgaggttgctagtgaac

SEQ ID NO: 18180 - DNA, 17 bp, synthetic construct
  source 1..17: mol_type = other DNA
tgaggttgctagtgaac

SEQ ID NO: 18181 - DNA, 17 bp, synthetic construct
  source 1..17: mol_type = other DNA
gcaaggtgaacgtggat

SEQ ID NO: 18182 - DNA, 17 bp, synthetic construct
  source 1..17: mol_type = other DNA
caaggtgaacgtggatg

SEQ ID NO: 18183 - DNA, 17 bp, synthetic construct
  source 1..17: mol_type = other DNA
gaggttgctagtgaaca

SEQ ID NO: 18184 - DNA, 17 bp, synthetic construct
  source 1..17: mol_type = other DNA
gaggttgctagtgaaca

SEQ ID NO: 18185 - DNA, 17 bp, synthetic construct
  source 1..17: mol_type = other DNA
caaggtgaacgtggatg

SEQ ID NO: 18186 - DNA, 17 bp, synthetic construct
  source 1..17: mol_type = other DNA
gaggttgctagtgaaca

SEQ ID NO: 18187 - DNA, 21 bp, synthetic construct
  source 1..21: mol_type = other DNA
gcccagtttctattggtctcc

SEQ ID NO: 18188 - DNA, 21 bp, synthetic construct
  source 1..21: mol_type = other DNA
gcccagtttctattggtctcc

SEQ ID NO: 18189 - DNA, 20 bp, synthetic construct
  source 1..20: mol_type = other DNA
tctattggtctccttaaacc

SEQ ID NO: 18190 - DNA, 20 bp, synthetic construct
  source 1..20: mol_type = other DNA
ttctattggtctccttaaac

SEQ ID NO: 18191 - DNA, 23 bp, synthetic construct
  source 1..23: mol_type = other DNA
tgtaaccttgataccaacctgcc

SEQ ID NO: 18192 - DNA, 21 bp, synthetic construct
  source 1..21: mol_type = other DNA
ttggtctccttaaacctgtct

SEQ ID NO: 18193 - DNA, 23 bp, synthetic construct
  source 1..23: mol_type = other DNA
atcaaggttacaagacaggttta

SEQ ID NO: 18194 - DNA, 21 bp, synthetic construct
  source 1..21: mol_type = other DNA
ttacaagacaggtttaaggag

SEQ ID NO: 18195 - DNA, 23 bp, synthetic construct
  source 1..23: mol_type = other DNA
atcaaggttacaagacaggttta

SEQ ID NO: 18196 - DNA, 21 bp, synthetic construct
  source 1..21: mol_type = other DNA
ttacaagacaggtttaaggag

SEQ ID NO: 18197 - DNA, 20 bp, synthetic construct
  source 1..20: mol_type = other DNA
ttctattggtctccttaaac

SEQ ID NO: 18198 - DNA, 20 bp, synthetic construct
  source 1..20: mol_type = other DNA
tctattggtctccttaaacc

SEQ ID NO: 18199 - DNA, 20 bp, synthetic construct
  source 1..20: mol_type = other DNA
ggttacaagacaggtttaag

SEQ ID NO: 18200 - DNA, 20 bp, synthetic construct
  source 1..20: mol_type = other DNA
aaggttacaagacaggttta

SEQ ID NO: 18201 - DNA, 20 bp, synthetic construct
  source 1..20: mol_type = other DNA
gttacaagacaggtttaagg

SEQ ID NO: 18202 - DNA, 20 bp, synthetic construct
  source 1..20: mol_type = other DNA
gttacaagacaggtttaagg

SEQ ID NO: 18203 - DNA, 23 bp, synthetic construct
  source 1..23: mol_type = other DNA
atcaaggttacaagacaggttta

SEQ ID NO: 18204 - DNA, 21 bp, synthetic construct
  source 1..21: mol_type = other DNA
ttacaagacaggtttaaggag

SEQ ID NO: 18205 - DNA, 21 bp, synthetic construct
  source 1..21: mol_type = other DNA
ttggtctccttaaacctgtct

SEQ ID NO: 18206 - DNA, 21 bp, synthetic construct
  source 1..21: mol_type = other DNA
tcaaggttacaagacaggttt

SEQ ID NO: 18207 - DNA, 21 bp, synthetic construct
  source 1..21: mol_type = other DNA
aaggttacaagacaggtttaa

SEQ ID NO: 18208 - DNA, 21 bp, synthetic construct
  source 1..21: mol_type = other DNA
tctccacatgcccagtttcta

SEQ ID NO: 18209 - DNA, 20 bp, synthetic construct
  source 1..20: mol_type = other DNA
ggttacaagacaggtttaag

SEQ ID NO: 18210 - DNA, 20 bp, synthetic construct
  source 1..20: mol_type = other DNA
ttacaagacaggtttaagga

SEQ ID NO: 18211 - DNA, 20 bp, synthetic construct
  source 1..20: mol_type = other DNA
tctattggtctccttaaacc

SEQ ID NO: 18212 - DNA, 20 bp, synthetic construct
  source 1..20: mol_type = other DNA
ctattggtctccttaaacct

SEQ ID NO: 18213 - DNA, 23 bp, synthetic construct
  source 1..23: mol_type = other DNA
tgtaaccttgataccaacctgcc

SEQ ID NO: 18214 - DNA, 21 bp, synthetic construct
  source 1..21: mol_type = other DNA
ttggtctccttaaacctgtct

SEQ ID NO: 18215 - DNA, 21 bp, synthetic construct
  source 1..21: mol_type = other DNA
ttacaagacaggtttaaggag

SEQ ID NO: 18216 - DNA, 21 bp, synthetic construct
  source 1..21: mol_type = other DNA
aagacaggtttaaggagacca

SEQ ID NO: 18217 - DNA, 20 bp, synthetic construct
  source 1..20: mol_type = other DNA
ttggtctccttaaacctgtc

SEQ ID NO: 18218 - DNA, 20 bp, synthetic construct
  source 1..20: mol_type = other DNA
tccacatgcccagtttctat

SEQ ID NO: 18219 - DNA, 20 bp, synthetic construct
  source 1..20: mol_type = other DNA
tattggtctccttaaacctg

SEQ ID NO: 18220 - DNA, 20 bp, synthetic construct
  source 1..20: mol_type = other DNA
tctattggtctccttaaacc

SEQ ID NO: 18221 - DNA, 20 bp, synthetic construct
  source 1..20: mol_type = other DNA
tacaagacaggtttaaggag

SEQ ID NO: 18222 - DNA, 23 bp, synthetic construct
  source 1..23: mol_type = other DNA
tgtaaccttgataccaacctgcc

SEQ ID NO: 18223 - DNA, 21 bp, synthetic construct
  source 1..21: mol_type = other DNA
ttggtctccttaaacctgtct

SEQ ID NO: 18224 - DNA, 21 bp, synthetic construct
  source 1..21: mol_type = other DNA
ttacaagacaggtttaaggag

SEQ ID NO: 18225 - DNA, 21 bp, synthetic construct
  source 1..21: mol_type = other DNA
tctccacatgcccagtttcta

SEQ ID NO: 18226 - DNA, 21 bp, synthetic construct
  source 1..21: mol_type = other DNA
tctccacatgcccagtttcta

SEQ ID NO: 18227 - DNA, 20 bp, synthetic construct
  source 1..20: mol_type = other DNA
ttggtctccttaaacctgtc

SEQ ID NO: 18228 - DNA, 20 bp, synthetic construct
  source 1..20: mol_type = other DNA
attggtctccttaaacctgt

SEQ ID NO: 18229 - DNA, 20 bp, synthetic construct
  source 1..20: mol_type = other DNA
acaagacaggtttaaggaga

SEQ ID NO: 18230 - DNA, 21 bp, synthetic construct
  source 1..21: mol_type = other DNA
ttggtctccttaaacctgtct

SEQ ID NO: 18231 - DNA, 20 bp, synthetic construct
  source 1..20: mol_type = other DNA
tggtctccttaaacctgtct

SEQ ID NO: 18232 - DNA, 20 bp, synthetic construct
  source 1..20: mol_type = other DNA
ttggtctccttaaacctgtc

SEQ ID NO: 18233 - DNA, 20 bp, synthetic construct
  source 1..20: mol_type = other DNA
caagacaggtttaaggagac

SEQ ID NO: 18234 - DNA, 20 bp, synthetic construct
  source 1..20: mol_type = other DNA
ttggtctccttaaacctgtc

SEQ ID NO: 18235 - DNA, 20 bp, synthetic construct
  source 1..20: mol_type = other DNA
tggtctccttaaacctgtct

SEQ ID NO: 18236 - DNA, 20 bp, synthetic construct
  source 1..20: mol_type = other DNA
aagacaggtttaaggagacc

SEQ ID NO: 18237 - DNA, 23 bp, synthetic construct
  source 1..23: mol_type = other DNA
agacaggtttaaggagaccaata

SEQ ID NO: 18238 - DNA, 23 bp, synthetic construct
  source 1..23: mol_type = other DNA
agacaggtttaaggagaccaata

SEQ ID NO: 18239 - DNA, 20 bp, synthetic construct
  source 1..20: mol_type = other DNA
agacaggtttaaggagacca

SEQ ID NO: 18240 - DNA, 20 bp, synthetic construct
  source 1..20: mol_type = other DNA
ggtctccttaaacctgtctt

SEQ ID NO: 18241 - DNA, 20 bp, synthetic construct
  source 1..20: mol_type = other DNA
gacaggtttaaggagaccaa

SEQ ID NO: 18242 - DNA, 20 bp, synthetic construct
  source 1..20: mol_type = other DNA
gtctccttaaacctgtcttg

SEQ ID NO: 18243 - DNA, 23 bp, synthetic construct
  source 1..23: mol_type = other DNA
agacaggtttaaggagaccaata

SEQ ID NO: 18244 - DNA, 24 bp, synthetic construct
  source 1..24: mol_type = other DNA
tcaaggttacaagacaggtttaag

SEQ ID NO: 18245 - DNA, 20 bp, synthetic construct
  source 1..20: mol_type = other DNA
acaggtttaaggagaccaat

SEQ ID NO: 18246 - DNA, 20 bp, synthetic construct
  source 1..20: mol_type = other DNA
tctccttaaacctgtcttgt

SEQ ID NO: 18247 - DNA, 23 bp, synthetic construct
  source 1..23: mol_type = other DNA
agacaggtttaaggagaccaata

SEQ ID NO: 18248 - DNA, 20 bp, synthetic construct
  source 1..20: mol_type = other DNA
caggtttaaggagaccaata

SEQ ID NO: 18249 - DNA, 20 bp, synthetic construct
  source 1..20: mol_type = other DNA
ctccttaaacctgtcttgta

SEQ ID NO: 18250 - DNA, 23 bp, synthetic construct
  source 1..23: mol_type = other DNA
ttggtctccttaaacctgtcttg

SEQ ID NO: 18251 - DNA, 23 bp, synthetic construct
  source 1..23: mol_type = other DNA
ttggtctccttaaacctgtcttg

SEQ ID NO: 18252 - DNA, 24 bp, synthetic construct
  source 1..24: mol_type = other DNA
tattggtctccttaaacctgtctt

SEQ ID NO: 18253 - DNA, 20 bp, synthetic construct
  source 1..20: mol_type = other DNA
tccttaaacctgtcttgtaa

SEQ ID NO: 18254 - DNA, 20 bp, synthetic construct
  source 1..20: mol_type = other DNA
aggtttaaggagaccaatag

SEQ ID NO: 18255 - DNA, 23 bp, synthetic construct
  source 1..23: mol_type = other DNA
ttggtctccttaaacctgtcttg

SEQ ID NO: 18256 - DNA, 23 bp, synthetic construct
  source 1..23: mol_type = other DNA
agacaggtttaaggagaccaata

SEQ ID NO: 18257 - DNA, 23 bp, synthetic construct
  source 1..23: mol_type = other DNA
ttggtctccttaaacctgtcttg

SEQ ID NO: 18258 - DNA, 20 bp, synthetic construct
  source 1..20: mol_type = other DNA
ttaaacctgtcttgtaacct

SEQ ID NO: 18259 - DNA, 20 bp, synthetic construct
  source 1..20: mol_type = other DNA
ggtttaaggagaccaataga

SEQ ID NO: 18260 - DNA, 20 bp, synthetic construct
  source 1..20: mol_type = other DNA
ccttaaacctgtcttgtaac

SEQ ID NO: 18261 - DNA, 20 bp, synthetic construct
  source 1..20: mol_type = other DNA
cttaaacctgtcttgtaacc

SEQ ID NO: 18262 - DNA, 20 bp, synthetic construct
  source 1..20: mol_type = other DNA
cttaaacctgtcttgtaacc

SEQ ID NO: 18263 - DNA, 20 bp, synthetic construct
  source 1..20: mol_type = other DNA
ttaaggagaccaatagaaac

SEQ ID NO: 18264 - DNA, 20 bp, synthetic construct
  source 1..20: mol_type = other DNA
gtttaaggagaccaatagaa

SEQ ID NO: 18265 - DNA, 23 bp, synthetic construct
  source 1..23: mol_type = other DNA
ccttaaacctgtcttgtaacctt

SEQ ID NO: 18266 - DNA, 21 bp, synthetic construct
  source 1..21: mol_type = other DNA
tccttaaacctgtcttgtaac

SEQ ID NO: 18267 - DNA, 20 bp, synthetic construct
  source 1..20: mol_type = other DNA
tttaaggagaccaatagaaa

SEQ ID NO: 18268 - DNA, 20 bp, synthetic construct
  source 1..20: mol_type = other DNA
tttaaggagaccaatagaaa

SEQ ID NO: 18269 - DNA, 20 bp, synthetic construct
  source 1..20: mol_type = other DNA
ttaaacctgtcttgtaacct

SEQ ID NO: 18270 - DNA, 23 bp, synthetic construct
  source 1..23: mol_type = other DNA
ggtttaaggagaccaatagaaac

SEQ ID NO: 18271 - DNA, 21 bp, synthetic construct
  source 1..21: mol_type = other DNA
gtttaaggagaccaatagaaa

SEQ ID NO: 18272 - DNA, 21 bp, synthetic construct
  source 1..21: mol_type = other DNA
tttaaggagaccaatagaaac

SEQ ID NO: 18273 - DNA, 20 bp, synthetic construct
  source 1..20: mol_type = other DNA
ttaaggagaccaatagaaac

SEQ ID NO: 18274 - DNA, 20 bp, synthetic construct
  source 1..20: mol_type = other DNA
taaacctgtcttgtaacctt

SEQ ID NO: 18275 - DNA, 21 bp, synthetic construct
  source 1..21: mol_type = other DNA
gtttaaggagaccaatagaaa

SEQ ID NO: 18276 - DNA, 20 bp, synthetic construct
  source 1..20: mol_type = other DNA
taaggagaccaatagaaact

SEQ ID NO: 18277 - DNA, 20 bp, synthetic construct
  source 1..20: mol_type = other DNA
taaggagaccaatagaaact

SEQ ID NO: 18278 - DNA, 20 bp, synthetic construct
  source 1..20: mol_type = other DNA
aaacctgtcttgtaaccttg

SEQ ID NO: 18279 - DNA, 20 bp, synthetic construct
  source 1..20: mol_type = other DNA
taaggagaccaatagaaact

SEQ ID NO: 18280 - DNA, 20 bp, synthetic construct
  source 1..20: mol_type = other DNA
taaggagaccaatagaaact

SEQ ID NO: 18281 - DNA, 20 bp, synthetic construct
  source 1..20: mol_type = other DNA
aaggagaccaatagaaactg

SEQ ID NO: 18282 - DNA, 20 bp, synthetic construct
  source 1..20: mol_type = other DNA
aaggagaccaatagaaactg

SEQ ID NO: 18283 - DNA, 20 bp, synthetic construct
  source 1..20: mol_type = other DNA
aacctgtcttgtaaccttga

SEQ ID NO: 18284 - DNA, 23 bp, synthetic construct
  source 1..23: mol_type = other DNA
cttaaacctgtcttgtaaccttg

SEQ ID NO: 18285 - DNA, 23 bp, synthetic construct
  source 1..23: mol_type = other DNA
cttaaacctgtcttgtaaccttg

SEQ ID NO: 18286 - DNA, 21 bp, synthetic construct
  source 1..21: mol_type = other DNA
tttaaggagaccaatagaaac

SEQ ID NO: 18287 - DNA, 21 bp, synthetic construct
  source 1..21: mol_type = other DNA
tttaaggagaccaatagaaac

SEQ ID NO: 18288 - DNA, 20 bp, synthetic construct
  source 1..20: mol_type = other DNA
taaggagaccaatagaaact

SEQ ID NO: 18289 - DNA, 20 bp, synthetic construct
  source 1..20: mol_type = other DNA
aggagaccaatagaaactgg

SEQ ID NO: 18290 - DNA, 20 bp, synthetic construct
  source 1..20: mol_type = other DNA
ttaaacctgtcttgtaacct

SEQ ID NO: 18291 - DNA, 20 bp, synthetic construct
  source 1..20: mol_type = other DNA
acctgtcttgtaaccttgat

SEQ ID NO: 18292 - DNA, 23 bp, synthetic construct
  source 1..23: mol_type = other DNA
ggtttaaggagaccaatagaaac

SEQ ID NO: 18293 - DNA, 23 bp, synthetic construct
  source 1..23: mol_type = other DNA
ggtttaaggagaccaatagaaac

SEQ ID NO: 18294 - DNA, 21 bp, synthetic construct
  source 1..21: mol_type = other DNA
gagaccaatagaaactgggca

SEQ ID NO: 18295 - DNA, 20 bp, synthetic construct
  source 1..20: mol_type = other DNA
cttgtaaccttgataccaac

SEQ ID NO: 18296 - DNA, 20 bp, synthetic construct
  source 1..20: mol_type = other DNA
cctgtcttgtaaccttgata

SEQ ID NO: 18297 - DNA, 20 bp, synthetic construct
  source 1..20: mol_type = other DNA
ggagaccaatagaaactggg

SEQ ID NO: 18298 - DNA, 20 bp, synthetic construct
  source 1..20: mol_type = other DNA
ttgtaaccttgataccaacc

SEQ ID NO: 18299 - DNA, 20 bp, synthetic construct
  source 1..20: mol_type = other DNA
gagaccaatagaaactgggc

SEQ ID NO: 18300 - DNA, 20 bp, synthetic construct
  source 1..20: mol_type = other DNA
ctgtcttgtaaccttgatac

SEQ ID NO: 18301 - DNA, 23 bp, synthetic construct
  source 1..23: mol_type = other DNA
aacctgtcttgtaaccttgatac

SEQ ID NO: 18302 - DNA, 20 bp, synthetic construct
  source 1..20: mol_type = other DNA
cttgtaaccttgataccaac

SEQ ID NO: 18303 - DNA, 20 bp, synthetic construct
  source 1..20: mol_type = other DNA
accttgataccaacctgccc

SEQ ID NO: 18304 - DNA, 20 bp, synthetic construct
  source 1..20: mol_type = other DNA
tgtcttgtaaccttgatacc

SEQ ID NO: 18305 - DNA, 20 bp, synthetic construct
  source 1..20: mol_type = other DNA
ttgtaaccttgataccaacc

SEQ ID NO: 18306 - DNA, 20 bp, synthetic construct
  source 1..20: mol_type = other DNA
agaccaatagaaactgggca

SEQ ID NO: 18307 - DNA, 23 bp, synthetic construct
  source 1..23: mol_type = other DNA
gaccaatagaaactgggcatgtg

SEQ ID NO: 18308 - DNA, 21 bp, synthetic construct
  source 1..21: mol_type = other DNA
agaccaatagaaactgggcat

SEQ ID NO: 18309 - DNA, 21 bp, synthetic construct
  source 1..21: mol_type = other DNA
taaccttgataccaacctgcc

SEQ ID NO: 18310 - DNA, 21 bp, synthetic construct
  source 1..21: mol_type = other DNA
gtaaccttgataccaacctgc

SEQ ID NO: 18311 - DNA, 20 bp, synthetic construct
  source 1..20: mol_type = other DNA
cttgtaaccttgataccaac

SEQ ID NO: 18312 - DNA, 20 bp, synthetic construct
  source 1..20: mol_type = other DNA
gtcttgtaaccttgatacca

SEQ ID NO: 18313 - DNA, 20 bp, synthetic construct
  source 1..20: mol_type = other DNA
agaccaatagaaactgggca

SEQ ID NO: 18314 - DNA, 20 bp, synthetic construct
  source 1..20: mol_type = other DNA
gaccaatagaaactgggcat

SEQ ID NO: 18315 - DNA, 21 bp, synthetic construct
  source 1..21: mol_type = other DNA
tgtaaccttgataccaacctg

SEQ ID NO: 18316 - DNA, 21 bp, synthetic construct
  source 1..21: mol_type = other DNA
tgtaaccttgataccaacctg

SEQ ID NO: 18317 - DNA, 20 bp, synthetic construct
  source 1..20: mol_type = other DNA
accaatagaaactgggcatg

SEQ ID NO: 18318 - DNA, 20 bp, synthetic construct
  source 1..20: mol_type = other DNA
accaatagaaactgggcatg

SEQ ID NO: 18319 - DNA, 20 bp, synthetic construct
  source 1..20: mol_type = other DNA
tcttgtaaccttgataccaa

SEQ ID NO: 18320 - DNA, 21 bp, synthetic construct
  source 1..21: mol_type = other DNA
accaatagaaactgggcatgt

SEQ ID NO: 18321 - DNA, 20 bp, synthetic construct
  source 1..20: mol_type = other DNA
ccaatagaaactgggcatgt

SEQ ID NO: 18322 - DNA, 20 bp, synthetic construct
  source 1..20: mol_type = other DNA
cttgtaaccttgataccaac

SEQ ID NO: 18323 - DNA, 21 bp, synthetic construct
  source 1..21: mol_type = other DNA
accaatagaaactgggcatgt

SEQ ID NO: 18324 - DNA, 21 bp, synthetic construct
  source 1..21: mol_type = other DNA
accaatagaaactgggcatgt

SEQ ID NO: 18325 - DNA, 20 bp, synthetic construct
  source 1..20: mol_type = other DNA
ccaatagaaactgggcatgt

SEQ ID NO: 18326 - DNA, 20 bp, synthetic construct
  source 1..20: mol_type = other DNA
caatagaaactgggcatgtg

SEQ ID NO: 18327 - DNA, 20 bp, synthetic construct
  source 1..20: mol_type = other DNA
ttgtaaccttgataccaacc

SEQ ID NO: 18328 - DNA, 20 bp, synthetic construct
  source 1..20: mol_type = other DNA
caatagaaactgggcatgtg

SEQ ID NO: 18329 - DNA, 20 bp, synthetic construct
  source 1..20: mol_type = other DNA
accaatagaaactgggcatg

SEQ ID NO: 18330 - DNA, 20 bp, synthetic construct
  source 1..20: mol_type = other DNA
aatagaaactgggcatgtgg

SEQ ID NO: 18331 - DNA, 20 bp, synthetic construct
  source 1..20: mol_type = other DNA
aatagaaactgggcatgtgg

SEQ ID NO: 18332 - DNA, 20 bp, synthetic construct
  source 1..20: mol_type = other DNA
tgtaaccttgataccaacct

SEQ ID NO: 18333 - DNA, 21 bp, synthetic construct
  source 1..21: mol_type = other DNA
agaccaatagaaactgggcat

SEQ ID NO: 18334 - DNA, 21 bp, synthetic construct
  source 1..21: mol_type = other DNA
atagaaactgggcatgtggag

SEQ ID NO: 18335 - DNA, 20 bp, synthetic construct
  source 1..20: mol_type = other DNA
caatagaaactgggcatgtg

SEQ ID NO: 18336 - DNA, 20 bp, synthetic construct
  source 1..20: mol_type = other DNA
accaatagaaactgggcatg

SEQ ID NO: 18337 - DNA, 20 bp, synthetic construct
  source 1..20: mol_type = other DNA
atagaaactgggcatgtgga

SEQ ID NO: 18338 - DNA, 20 bp, synthetic construct
  source 1..20: mol_type = other DNA
aatagaaactgggcatgtgg

SEQ ID NO: 18339 - DNA, 20 bp, synthetic construct
  source 1..20: mol_type = other DNA
gtaaccttgataccaacctg

SEQ ID NO: 18340 - DNA, 23 bp, synthetic construct
  source 1..23: mol_type = other DNA
gaccaatagaaactgggcatgtg

SEQ ID NO: 18341 - DNA, 23 bp, synthetic construct
  source 1..23: mol_type = other DNA
gtcttgtaaccttgataccaacc

SEQ ID NO: 18342 - DNA, 23 bp, synthetic construct
  source 1..23: mol_type = other DNA
gaccaatagaaactgggcatgtg

SEQ ID NO: 18343 - DNA, 23 bp, synthetic construct
  source 1..23: mol_type = other DNA
gtcttgtaaccttgataccaacc

SEQ ID NO: 18344 - DNA, 24 bp, synthetic construct
  source 1..24: mol_type = other DNA
tgtaaccttgataccaacctgccc

SEQ ID NO: 18345 - DNA, 23 bp, synthetic construct
  source 1..23: mol_type = other DNA
aatagaaactgggcatgtggaga

SEQ ID NO: 18346 - DNA, 21 bp, synthetic construct
  source 1..21: mol_type = other DNA
atagaaactgggcatgtggag

SEQ ID NO: 18347 - DNA, 21 bp, synthetic construct
  source 1..21: mol_type = other DNA
agaccaatagaaactgggcat

SEQ ID NO: 18348 - DNA, 21 bp, synthetic construct
  source 1..21: mol_type = other DNA
atagaaactgggcatgtggag

SEQ ID NO: 18349 - DNA, 20 bp, synthetic construct
  source 1..20: mol_type = other DNA
agaaactgggcatgtggaga

SEQ ID NO: 18350 - DNA, 20 bp, synthetic construct
  source 1..20: mol_type = other DNA
tagaaactgggcatgtggag

SEQ ID NO: 18351 - DNA, 20 bp, synthetic construct
  source 1..20: mol_type = other DNA
taaccttgataccaacctgc

SEQ ID NO: 18352 - DNA, 23 bp, synthetic construct
  source 1..23: mol_type = other DNA
gtaaccttgataccaacctgccc

SEQ ID NO: 18353 - DNA, 23 bp, synthetic construct
  source 1..23: mol_type = other DNA
gtaaccttgataccaacctgccc

SEQ ID NO: 18354 - DNA, 21 bp, synthetic construct
  source 1..21: mol_type = other DNA
tagaaactgggcatgtggaga

SEQ ID NO: 18355 - DNA, 21 bp, synthetic construct
  source 1..21: mol_type = other DNA
atagaaactgggcatgtggag

SEQ ID NO: 18356 - DNA, 20 bp, synthetic construct
  source 1..20: mol_type = other DNA
accttgataccaacctgccc

SEQ ID NO: 18357 - DNA, 20 bp, synthetic construct
  source 1..20: mol_type = other DNA
aaccttgataccaacctgcc

SEQ ID NO: 18358 - DNA, 20 bp, synthetic construct
  source 1..20: mol_type = other DNA
agaaactgggcatgtggaga

SEQ ID NO: 18359 - DNA, 21 bp, synthetic construct
  source 1..21: mol_type = other DNA
agaaactgggcatgtggagac

SEQ ID NO: 18360 - DNA, 20 bp, synthetic construct
  source 1..20: mol_type = other DNA
accttgataccaacctgccc

SEQ ID NO: 18361 - DNA, 20 bp, synthetic construct
  source 1..20: mol_type = other DNA
accttgataccaacctgccc

SEQ ID NO: 18362 - DNA, 20 bp, synthetic construct
  source 1..20: mol_type = other DNA
gaaactgggcatgtggagac

SEQ ID NO: 18363 - DNA, 23 bp, synthetic construct
  source 1..23: mol_type = other DNA
gtaaccttgataccaacctgccc

SEQ ID NO: 18364-18540 - skipped (177 entries)

SEQ ID NO: 18541 - DNA, 21 bp, synthetic construct
  source 1..21: mol_type = other DNA
ggctctgccctgacttttatg

SEQ ID NO: 18542 - DNA, 21 bp, synthetic construct
  source 1..21: mol_type = other DNA
ggctctgccctgacttttatg

SEQ ID NO: 18543 - DNA, 20 bp, synthetic construct
  source 1..20: mol_type = other DNA
ctgccctgacttttatgccc

SEQ ID NO: 18544 - DNA, 20 bp, synthetic construct
  source 1..20: mol_type = other DNA
tctgccctgacttttatgcc

SEQ ID NO: 18545 - DNA, 23 bp, synthetic construct
  source 1..23: mol_type = other DNA
cctggctcctgccctccctgctc

SEQ ID NO: 18546 - DNA, 21 bp, synthetic construct
  source 1..21: mol_type = other DNA
ggctctgccctgacttttatg

SEQ ID NO: 18547 - DNA, 23 bp, synthetic construct
  source 1..23: mol_type = other DNA
gagccagggctgggcataaaagt

SEQ ID NO: 18548 - DNA, 21 bp, synthetic construct
  source 1..21: mol_type = other DNA
gagccagggctgggcataaaa

SEQ ID NO: 18549 - DNA, 23 bp, synthetic construct
  source 1..23: mol_type = other DNA
gagccagggctgggcataaaagt

SEQ ID NO: 18550 - DNA, 21 bp, synthetic construct
  source 1..21: mol_type = other DNA
gagccagggctgggcataaaa

SEQ ID NO: 18551 - DNA, 20 bp, synthetic construct
  source 1..20: mol_type = other DNA
tctgccctgacttttatgcc

SEQ ID NO: 18552 - DNA, 20 bp, synthetic construct
  source 1..20: mol_type = other DNA
ctgccctgacttttatgccc

SEQ ID NO: 18553 - DNA, 20 bp, synthetic construct
  source 1..20: mol_type = other DNA
ggagccagggctgggcataa

SEQ ID NO: 18554 - DNA, 20 bp, synthetic construct
  source 1..20: mol_type = other DNA
cagggctgggcataaaagtc

SEQ ID NO: 18555 - DNA, 20 bp, synthetic construct
  source 1..20: mol_type = other DNA
gagccagggctgggcataaa

SEQ ID NO: 18556 - DNA, 20 bp, synthetic construct
  source 1..20: mol_type = other DNA
gagccagggctgggcataaa

SEQ ID NO: 18557 - DNA, 23 bp, synthetic construct
  source 1..23: mol_type = other DNA
gagccagggctgggcataaaagt

SEQ ID NO: 18558 - DNA, 21 bp, synthetic construct
  source 1..21: mol_type = other DNA
gagccagggctgggcataaaa

SEQ ID NO: 18559 - DNA, 21 bp, synthetic construct
  source 1..21: mol_type = other DNA
gccctgacttttatgcccagc

SEQ ID NO: 18560 - DNA, 21 bp, synthetic construct
  source 1..21: mol_type = other DNA
gccagggctgggcataaaagt

SEQ ID NO: 18561 - DNA, 21 bp, synthetic construct
  source 1..21: mol_type = other DNA
agccagggctgggcataaaag

SEQ ID NO: 18562 - DNA, 21 bp, synthetic construct
  source 1..21: mol_type = other DNA
ccctgacttttatgcccagcc

SEQ ID NO: 18563 - DNA, 20 bp, synthetic construct
  source 1..20: mol_type = other DNA
ccagggctgggcataaaagt

SEQ ID NO: 18564 - DNA, 20 bp, synthetic construct
  source 1..20: mol_type = other DNA
agccagggctgggcataaaa

SEQ ID NO: 18565 - DNA, 20 bp, synthetic construct
  source 1..20: mol_type = other DNA
ctgccctgacttttatgccc

SEQ ID NO: 18566 - DNA, 20 bp, synthetic construct
  source 1..20: mol_type = other DNA
tgccctgacttttatgccca

SEQ ID NO: 18567 - DNA, 23 bp, synthetic construct
  source 1..23: mol_type = other DNA
cctggctcctgccctccctgctc

SEQ ID NO: 18568 - DNA, 21 bp, synthetic construct
  source 1..21: mol_type = other DNA
gccctgacttttatgcccagc

SEQ ID NO: 18569 - DNA, 21 bp, synthetic construct
  source 1..21: mol_type = other DNA
agccagggctgggcataaaag

SEQ ID NO: 18570 - DNA, 21 bp, synthetic construct
  source 1..21: mol_type = other DNA
agccagggctgggcataaaag

SEQ ID NO: 18571 - DNA, 20 bp, synthetic construct
  source 1..20: mol_type = other DNA
cctgacttttatgcccagcc

SEQ ID NO: 18572 - DNA, 20 bp, synthetic construct
  source 1..20: mol_type = other DNA
ctgacttttatgcccagccc

SEQ ID NO: 18573 - DNA, 20 bp, synthetic construct
  source 1..20: mol_type = other DNA
gccctgacttttatgcccag

SEQ ID NO: 18574 - DNA, 20 bp, synthetic construct
  source 1..20: mol_type = other DNA
ctgccctgacttttatgccc

SEQ ID NO: 18575 - DNA, 20 bp, synthetic construct
  source 1..20: mol_type = other DNA
gccagggctgggcataaaag

SEQ ID NO: 18576 - DNA, 23 bp, synthetic construct
  source 1..23: mol_type = other DNA
cctggctcctgccctccctgctc

SEQ ID NO: 18577 - DNA, 21 bp, synthetic construct
  source 1..21: mol_type = other DNA
gccctgacttttatgcccagc

SEQ ID NO: 18578 - DNA, 21 bp, synthetic construct
  source 1..21: mol_type = other DNA
gccagggctgggcataaaagt

SEQ ID NO: 18579 - DNA, 21 bp, synthetic construct
  source 1..21: mol_type = other DNA
ccctgacttttatgcccagcc

SEQ ID NO: 18580 - DNA, 21 bp, synthetic construct
  source 1..21: mol_type = other DNA
ccctgacttttatgcccagcc

SEQ ID NO: 18581 - DNA, 20 bp, synthetic construct
  source 1..20: mol_type = other DNA
cctgacttttatgcccagcc

SEQ ID NO: 18582 - DNA, 20 bp, synthetic construct
  source 1..20: mol_type = other DNA
ccctgacttttatgcccagc

SEQ ID NO: 18583 - DNA, 20 bp, synthetic construct
  source 1..20: mol_type = other DNA
ccagggctgggcataaaagt

SEQ ID NO: 18584 - DNA, 21 bp, synthetic construct
  source 1..21: mol_type = other DNA
gccctgacttttatgcccagc

SEQ ID NO: 18585 - DNA, 20 bp, synthetic construct
  source 1..20: mol_type = other DNA
ctgacttttatgcccagccc

SEQ ID NO: 18586 - DNA, 20 bp, synthetic construct
  source 1..20: mol_type = other DNA
cctgacttttatgcccagcc

SEQ ID NO: 18587 - DNA, 20 bp, synthetic construct
  source 1..20: mol_type = other DNA
cagggctgggcataaaagtc

SEQ ID NO: 18588 - DNA, 20 bp, synthetic construct
  source 1..20: mol_type = other DNA
ctgacttttatgcccagccc

SEQ ID NO: 18589 - DNA, 20 bp, synthetic construct
  source 1..20: mol_type = other DNA
ctgacttttatgcccagccc

SEQ ID NO: 18590 - DNA, 20 bp, synthetic construct
  source 1..20: mol_type = other DNA
agggctgggcataaaagtca

SEQ ID NO: 18591 - DNA, 23 bp, synthetic construct
  source 1..23: mol_type = other DNA
agccagggctgggcataaaagtc

SEQ ID NO: 18592 - DNA, 23 bp, synthetic construct
  source 1..23: mol_type = other DNA
agccagggctgggcataaaagtc

SEQ ID NO: 18593 - DNA, 20 bp, synthetic construct
  source 1..20: mol_type = other DNA
gggctgggcataaaagtcag

SEQ ID NO: 18594 - DNA, 20 bp, synthetic construct
  source 1..20: mol_type = other DNA
tgacttttatgcccagccct

SEQ ID NO: 18595 - DNA, 20 bp, synthetic construct
  source 1..20: mol_type = other DNA
ggctgggcataaaagtcagg

SEQ ID NO: 18596 - DNA, 20 bp, synthetic construct
  source 1..20: mol_type = other DNA
gacttttatgcccagccctg

SEQ ID NO: 18597 - DNA, 23 bp, synthetic construct
  source 1..23: mol_type = other DNA
gggctgggcataaaagtcagggc

SEQ ID NO: 18598 - DNA, 24 bp, synthetic construct
  source 1..24: mol_type = other DNA
agggctgggcataaaagtcagggc

SEQ ID NO: 18599 - DNA, 20 bp, synthetic construct
  source 1..20: mol_type = other DNA
gctgggcataaaagtcaggg

SEQ ID NO: 18600 - DNA, 20 bp, synthetic construct
  source 1..20: mol_type = other DNA
acttttatgcccagccctgg

SEQ ID NO: 18601 - DNA, 23 bp, synthetic construct
  source 1..23: mol_type = other DNA
gggctgggcataaaagtcagggc

SEQ ID NO: 18602 - DNA, 20 bp, synthetic construct
  source 1..20: mol_type = other DNA
ctgggcataaaagtcagggc

SEQ ID NO: 18603 - DNA, 20 bp, synthetic construct
  source 1..20: mol_type = other DNA
cttttatgcccagccctggc

SEQ ID NO: 18604 - DNA, 23 bp, synthetic construct
  source 1..23: mol_type = other DNA
gacttttatgcccagccctggct

SEQ ID NO: 18605 - DNA, 23 bp, synthetic construct
  source 1..23: mol_type = other DNA
gacttttatgcccagccctggct

SEQ ID NO: 18606 - DNA, 24 bp, synthetic construct
  source 1..24: mol_type = other DNA
tgacttttatgcccagccctggct

SEQ ID NO: 18607 - DNA, 20 bp, synthetic construct
  source 1..20: mol_type = other DNA
ttttatgcccagccctggct

SEQ ID NO: 18608 - DNA, 20 bp, synthetic construct
  source 1..20: mol_type = other DNA
tgggcataaaagtcagggca

SEQ ID NO: 18609 - DNA, 23 bp, synthetic construct
  source 1..23: mol_type = other DNA
gacttttatgcccagccctggct

SEQ ID NO: 18610 - DNA, 23 bp, synthetic construct
  source 1..23: mol_type = other DNA
ggctgggcataaaagtcagggca

SEQ ID NO: 18611 - DNA, 23 bp, synthetic construct
  source 1..23: mol_type = other DNA
gacttttatgcccagccctggct

SEQ ID NO: 18612 - DNA, 20 bp, synthetic construct
  source 1..20: mol_type = other DNA
ttatgcccagccctggctcc

SEQ ID NO: 18613 - DNA, 20 bp, synthetic construct
  source 1..20: mol_type = other DNA
gggcataaaagtcagggcag

SEQ ID NO: 18614 - DNA, 20 bp, synthetic construct
  source 1..20: mol_type = other DNA
tttatgcccagccctggctc

SEQ ID NO: 18615 - DNA, 20 bp, synthetic construct
  source 1..20: mol_type = other DNA
tttatgcccagccctggctc

SEQ ID NO: 18616 - DNA, 20 bp, synthetic construct
  source 1..20: mol_type = other DNA
ttatgcccagccctggctcc

SEQ ID NO: 18617 - DNA, 20 bp, synthetic construct
  source 1..20: mol_type = other DNA
gggcataaaagtcagggcag

SEQ ID NO: 18618 - DNA, 20 bp, synthetic construct
  source 1..20: mol_type = other DNA
ggcataaaagtcagggcaga

SEQ ID NO: 18619 - DNA, 23 bp, synthetic construct
  source 1..23: mol_type = other DNA
cttttatgcccagccctggctcc

SEQ ID NO: 18620 - DNA, 21 bp, synthetic construct
  source 1..21: mol_type = other DNA
gccctgacttttatgcccagc

SEQ ID NO: 18621 - DNA, 20 bp, synthetic construct
  source 1..20: mol_type = other DNA
tgggcataaaagtcagggca

SEQ ID NO: 18622 - DNA, 20 bp, synthetic construct
  source 1..20: mol_type = other DNA
gcataaaagtcagggcagag

SEQ ID NO: 18623 - DNA, 20 bp, synthetic construct
  source 1..20: mol_type = other DNA
tatgcccagccctggctcct

SEQ ID NO: 18624 - DNA, 23 bp, synthetic construct
  source 1..23: mol_type = other DNA
tgggcataaaagtcagggcagag

SEQ ID NO: 18625 - DNA, 21 bp, synthetic construct
  source 1..21: mol_type = other DNA
ggctgggcataaaagtcaggg

SEQ ID NO: 18626 - DNA, 21 bp, synthetic construct
  source 1..21: mol_type = other DNA
gctgggcataaaagtcagggc

SEQ ID NO: 18627 - DNA, 20 bp, synthetic construct
  source 1..20: mol_type = other DNA
cataaaagtcagggcagagc

SEQ ID NO: 18628 - DNA, 20 bp, synthetic construct
  source 1..20: mol_type = other DNA
atgcccagccctggctcctg

SEQ ID NO: 18629 - DNA, 21 bp, synthetic construct
  source 1..21: mol_type = other DNA
ggctgggcataaaagtcaggg

SEQ ID NO: 18630 - DNA, 20 bp, synthetic construct
  source 1..20: mol_type = other DNA
gggcataaaagtcagggcag

SEQ ID NO: 18631 - DNA, 20 bp, synthetic construct
  source 1..20: mol_type = other DNA
ataaaagtcagggcagagcc

SEQ ID NO: 18632 - DNA, 20 bp, synthetic construct
  source 1..20: mol_type = other DNA
tgcccagccctggctcctgc

SEQ ID NO: 18633 - DNA, 20 bp, synthetic construct
  source 1..20: mol_type = other DNA
agtcagggcagagccatcta

SEQ ID NO: 18634 - DNA, 20 bp, synthetic construct
  source 1..20: mol_type = other DNA
agggctgggcataaaagtca

SEQ ID NO: 18635 - DNA, 20 bp, synthetic construct
  source 1..20: mol_type = other DNA
taaaagtcagggcagagcca

SEQ ID NO: 18636 - DNA, 20 bp, synthetic construct
  source 1..20: mol_type = other DNA
gtcagggcagagccatctat

SEQ ID NO: 18637 - DNA, 20 bp, synthetic construct
  source 1..20: mol_type = other DNA
gcccagccctggctcctgcc

SEQ ID NO: 18638 - DNA, 23 bp, synthetic construct
  source 1..23: mol_type = other DNA
tatgcccagccctggctcctgcc

SEQ ID NO: 18639 - DNA, 23 bp, synthetic construct
  source 1..23: mol_type = other DNA
tatgcccagccctggctcctgcc

SEQ ID NO: 18640 - DNA, 21 bp, synthetic construct
  source 1..21: mol_type = other DNA
ccagggctgggcataaaagtc

SEQ ID NO: 18641 - DNA, 21 bp, synthetic construct
  source 1..21: mol_type = other DNA
gctgggcataaaagtcagggc

SEQ ID NO: 18642 - DNA, 20 bp, synthetic construct
  source 1..20: mol_type = other DNA
agtcagggcagagccatcta

SEQ ID NO: 18643 - DNA, 20 bp, synthetic construct
  source 1..20: mol_type = other DNA
aaaagtcagggcagagccat

SEQ ID NO: 18644 - DNA, 20 bp, synthetic construct
  source 1..20: mol_type = other DNA
gccctggctcctgccctccc

SEQ ID NO: 18645 - DNA, 20 bp, synthetic construct
  source 1..20: mol_type = other DNA
cccagccctggctcctgccc

SEQ ID NO: 18646 - DNA, 23 bp, synthetic construct
  source 1..23: mol_type = other DNA
taaaagtcagggcagagccatct

SEQ ID NO: 18647 - DNA, 23 bp, synthetic construct
  source 1..23: mol_type = other DNA
taaaagtcagggcagagccatct

SEQ ID NO: 18648 - DNA, 21 bp, synthetic construct
  source 1..21: mol_type = other DNA
ggctgggcataaaagtcaggg

SEQ ID NO: 18649 - DNA, 20 bp, synthetic construct
  source 1..20: mol_type = other DNA
agccctggctcctgccctcc

SEQ ID NO: 18650 - DNA, 20 bp, synthetic construct
  source 1..20: mol_type = other DNA
ccagccctggctcctgccct

SEQ ID NO: 18651 - DNA, 20 bp, synthetic construct
  source 1..20: mol_type = other DNA
aaagtcagggcagagccatc

SEQ ID NO: 18652 - DNA, 20 bp, synthetic construct
  source 1..20: mol_type = other DNA
gccctggctcctgccctccc

SEQ ID NO: 18653 - DNA, 20 bp, synthetic construct
  source 1..20: mol_type = other DNA
aagtcagggcagagccatct

SEQ ID NO: 18654 - DNA, 20 bp, synthetic construct
  source 1..20: mol_type = other DNA
cagccctggctcctgccctc

SEQ ID NO: 18655 - DNA, 23 bp, synthetic construct
  source 1..23: mol_type = other DNA
gcccagccctggctcctgccctc

SEQ ID NO: 18656 - DNA, 20 bp, synthetic construct
  source 1..20: mol_type = other DNA
agccctggctcctgccctcc

SEQ ID NO: 18657 - DNA, 20 bp, synthetic construct
  source 1..20: mol_type = other DNA
gctcctgccctccctgctcc

SEQ ID NO: 18658 - DNA, 20 bp, synthetic construct
  source 1..20: mol_type = other DNA
agccctggctcctgccctcc

SEQ ID NO: 18659 - DNA, 20 bp, synthetic construct
  source 1..20: mol_type = other DNA
gccctggctcctgccctccc

SEQ ID NO: 18660 - DNA, 20 bp, synthetic construct
  source 1..20: mol_type = other DNA
agtcagggcagagccatcta

SEQ ID NO: 18661 - DNA, 23 bp, synthetic construct
  source 1..23: mol_type = other DNA
taaaagtcagggcagagccatct

SEQ ID NO: 18662 - DNA, 21 bp, synthetic construct
  source 1..21: mol_type = other DNA
ggctgggcataaaagtcaggg

SEQ ID NO: 18663 - DNA, 21 bp, synthetic construct
  source 1..21: mol_type = other DNA
tggctcctgccctccctgctc

SEQ ID NO: 18664 - DNA, 21 bp, synthetic construct
  source 1..21: mol_type = other DNA
tggctcctgccctccctgctc

SEQ ID NO: 18665 - DNA, 20 bp, synthetic construct
  source 1..20: mol_type = other DNA
agccctggctcctgccctcc

SEQ ID NO: 18666 - DNA, 20 bp, synthetic construct
  source 1..20: mol_type = other DNA
gccctggctcctgccctccc

SEQ ID NO: 18667 - DNA, 20 bp, synthetic construct
  source 1..20: mol_type = other DNA
gtcagggcagagccatctat

SEQ ID NO: 18668 - DNA, 20 bp, synthetic construct
  source 1..20: mol_type = other DNA
gtcagggcagagccatctat

SEQ ID NO: 18669 - DNA, 21 bp, synthetic construct
  source 1..21: mol_type = other DNA
ctggctcctgccctccctgct

SEQ ID NO: 18670 - DNA, 21 bp, synthetic construct
  source 1..21: mol_type = other DNA
ctggctcctgccctccctgct

SEQ ID NO: 18671 - DNA, 20 bp, synthetic construct
  source 1..20: mol_type = other DNA
agtcagggcagagccatcta

SEQ ID NO: 18672 - DNA, 20 bp, synthetic construct
  source 1..20: mol_type = other DNA
tcagggcagagccatctatt

SEQ ID NO: 18673 - DNA, 20 bp, synthetic construct
  source 1..20: mol_type = other DNA
ccctggctcctgccctccct

SEQ ID NO: 18674 - DNA, 21 bp, synthetic construct
  source 1..21: mol_type = other DNA
gctgggcataaaagtcagggc

SEQ ID NO: 18675 - DNA, 20 bp, synthetic construct
  source 1..20: mol_type = other DNA
cagggcagagccatctattg

SEQ ID NO: 18676 - DNA, 20 bp, synthetic construct
  source 1..20: mol_type = other DNA
cctggctcctgccctccctg

SEQ ID NO: 18677 - DNA, 21 bp, synthetic construct
  source 1..21: mol_type = other DNA
catctattgcttacatttgct

SEQ ID NO: 18678 - DNA, 21 bp, synthetic construct
  source 1..21: mol_type = other DNA
catctattgcttacatttgct

SEQ ID NO: 18679 - DNA, 20 bp, synthetic construct
  source 1..20: mol_type = other DNA
gtcagggcagagccatctat

SEQ ID NO: 18680 - DNA, 20 bp, synthetic construct
  source 1..20: mol_type = other DNA
agggcagagccatctattgc

SEQ ID NO: 18681 - DNA, 20 bp, synthetic construct
  source 1..20: mol_type = other DNA
ctggctcctgccctccctgc

SEQ ID NO: 18682 - DNA, 20 bp, synthetic construct
  source 1..20: mol_type = other DNA
gagccatctattgcttacat

SEQ ID NO: 18683 - DNA, 20 bp, synthetic construct
  source 1..20: mol_type = other DNA
agggctgggcataaaagtca

SEQ ID NO: 18684 - DNA, 20 bp, synthetic construct
  source 1..20: mol_type = other DNA
gggcagagccatctattgct

SEQ ID NO: 18685 - DNA, 20 bp, synthetic construct
  source 1..20: mol_type = other DNA
gtcagggcagagccatctat

SEQ ID NO: 18686 - DNA, 20 bp, synthetic construct
  source 1..20: mol_type = other DNA
tggctcctgccctccctgct

SEQ ID NO: 18687 - DNA, 21 bp, synthetic construct
  source 1..21: mol_type = other DNA
ccagggctgggcataaaagtc

SEQ ID NO: 18688 - DNA, 21 bp, synthetic construct
  source 1..21: mol_type = other DNA
gctgggcataaaagtcagggc

SEQ ID NO: 18689 - DNA, 20 bp, synthetic construct
  source 1..20: mol_type = other DNA
gagccatctattgcttacat

SEQ ID NO: 18690 - DNA, 20 bp, synthetic construct
  source 1..20: mol_type = other DNA
agggctgggcataaaagtca

SEQ ID NO: 18691 - DNA, 20 bp, synthetic construct
  source 1..20: mol_type = other DNA
ggcagagccatctattgctt

SEQ ID NO: 18692 - DNA, 20 bp, synthetic construct
  source 1..20: mol_type = other DNA
gtcagggcagagccatctat

SEQ ID NO: 18693 - DNA, 20 bp, synthetic construct
  source 1..20: mol_type = other DNA
ggctcctgccctccctgctc

SEQ ID NO: 18694 - DNA, 23 bp, synthetic construct
  source 1..23: mol_type = other DNA
agtcagggcagagccatctattg

SEQ ID NO: 18695 - DNA, 23 bp, synthetic construct
  source 1..23: mol_type = other DNA
cagccctggctcctgccctccct

SEQ ID NO: 18696 - DNA, 23 bp, synthetic construct
  source 1..23: mol_type = other DNA
agtcagggcagagccatctattg

SEQ ID NO: 18697 - DNA, 23 bp, synthetic construct
  source 1..23: mol_type = other DNA
cagccctggctcctgccctccct

SEQ ID NO: 18698 - DNA, 24 bp, synthetic construct
  source 1..24: mol_type = other DNA
cccagccctggctcctgccctccc

SEQ ID NO: 18699 - DNA, 23 bp, synthetic construct
  source 1..23: mol_type = other DNA
agggctgggcataaaagtcaggg

SEQ ID NO: 18700 - DNA, 21 bp, synthetic construct
  source 1..21: mol_type = other DNA
catctattgcttacatttgct

SEQ ID NO: 18701 - DNA, 21 bp, synthetic construct
  source 1..21: mol_type = other DNA
ccagggctgggcataaaagtc

SEQ ID NO: 18702 - DNA, 21 bp, synthetic construct
  source 1..21: mol_type = other DNA
gctgggcataaaagtcagggc

SEQ ID NO: 18703 - DNA, 20 bp, synthetic construct
  source 1..20: mol_type = other DNA
gagccatctattgcttacat

SEQ ID NO: 18704 - DNA, 20 bp, synthetic construct
  source 1..20: mol_type = other DNA
gcagagccatctattgctta

SEQ ID NO: 18705 - DNA, 20 bp, synthetic construct
  source 1..20: mol_type = other DNA
gctcctgccctccctgctcc

SEQ ID NO: 18706 - DNA, 23 bp, synthetic construct
  source 1..23: mol_type = other DNA
cagccctggctcctgccctccct

SEQ ID NO: 18707 - DNA, 23 bp, synthetic construct
  source 1..23: mol_type = other DNA
cagccctggctcctgccctccct

SEQ ID NO: 18708 - DNA, 21 bp, synthetic construct
  source 1..21: mol_type = other DNA
catctattgcttacatttgct

SEQ ID NO: 18709 - DNA, 21 bp, synthetic construct
  source 1..21: mol_type = other DNA
gctgggcataaaagtcagggc

SEQ ID NO: 18710 - DNA, 20 bp, synthetic construct
  source 1..20: mol_type = other DNA
ctcctgccctccctgctcct

SEQ ID NO: 18711 - DNA, 20 bp, synthetic construct
  source 1..20: mol_type = other DNA
ctcctgccctccctgctcct

SEQ ID NO: 18712 - DNA, 20 bp, synthetic construct
  source 1..20: mol_type = other DNA
cagagccatctattgcttac

SEQ ID NO: 18713 - DNA, 21 bp, synthetic construct
  source 1..21: mol_type = other DNA
catctattgcttacatttgct

SEQ ID NO: 18714 - DNA, 20 bp, synthetic construct
  source 1..20: mol_type = other DNA
cctgccctccctgctcctgg

SEQ ID NO: 18715 - DNA, 20 bp, synthetic construct
  source 1..20: mol_type = other DNA
tcctgccctccctgctcctg

SEQ ID NO: 18716 - DNA, 20 bp, synthetic construct
  source 1..20: mol_type = other DNA
agagccatctattgcttaca

SEQ ID NO: 18717 - DNA, 23 bp, synthetic construct
  source 1..23: mol_type = other DNA
cagccctggctcctgccctccct

SEQ ID NO: 18718-18894 - skipped (177 entries)

SEQ ID NO: 18895 - DNA, 139 bp, synthetic construct
  source 1..139: mol_type = other DNA
tggtgcatctgactcctgtgggttttagtactctggaaacagaatctactaaaacaaggcaaaatgccgtgtttatctcgtcaacttgttggcgagacccacagggcagtaacggcagacttctcctcaggagtcagat

SEQ ID NO: 18896 - DNA, 139 bp, synthetic construct; identical to SEQ ID NO: 18895
  source 1..139: mol_type = other DNA

SEQ ID NO: 18897 - DNA, 138 bp, synthetic construct
  source 1..138: mol_type = other DNA
ggtgcatctgactcctgtgggttttagagctagaaatagcaagttaaaataaggctagtccgttatcaacttgaaaaagtggcaccgagtcggtgccccacagggcagtaacggcagacttctcctcaggagtcagat

SEQ ID NO: 18898 - DNA, 138 bp, synthetic construct; identical to SEQ ID NO: 18897
  source 1..138: mol_type = other DNA

SEQ ID NO: 18899 - DNA, 141 bp, synthetic construct
  source 1..141: mol_type = other DNA
ccatggtgcatctgactcctgtggttttagtactctggaaacagaatctactaaaacaaggcaaaatgccgtgtttatctcgtcaacttgttggcgagaccacagggcagtaacggcagacttctcctcaggagtcagatg

SEQ ID NO: 18900 - DNA, 139 bp, synthetic construct
  source 1..139: mol_type = other DNA
atggtgcatctgactcctgtggttttagtactctggaaacagaatctactaaaacaaggcaaaatgccgtgtttatctcgtcaacttgttggcgagaccacagggcagtaacggcagacttctcctcaggagtcagatg

SEQ ID NO: 18901 - DNA, 141 bp, synthetic construct
  source 1..141: mol_type = other DNA
gcagtaacggcagacttctccacgttttagtactctggaaacagaatctactaaaacaaggcaaaatgccgtgtttatctcgtcaacttgttggcgagaacagacaccatggtgcatctgactcctgaggagaagtctgcc

SEQ ID NO: 18902 - DNA, 139 bp, synthetic construct
  source 1..139: mol_type = other DNA
agtaacggcagacttctccacgttttagtactctggaaacagaatctactaaaacaaggcaaaatgccgtgtttatctcgtcaacttgttggcgagaacagacaccatggtgcatctgactcctgaggagaagtctgcc

SEQ ID NO: 18903 - DNA, 141 bp, synthetic construct; identical to SEQ ID NO: 18901
  source 1..141: mol_type = other DNA

SEQ ID NO: 18904 - DNA, 139 bp, synthetic construct; identical to SEQ ID NO: 18902
  source 1..139: mol_type = other DNA

SEQ ID NO: 18905 - DNA, 138 bp, synthetic construct
  source 1..138: mol_type = other DNA
tggtgcatctgactcctgtggttttagagctagaaatagcaagttaaaataaggctagtccgttatcaacttgaaaaagtggcaccgagtcggtgcccacagggcagtaacggcagacttctcctcaggagtcagatg

SEQ ID NO: 18906 - DNA, 138 bp, synthetic construct; identical to SEQ ID NO: 18905
  source 1..138: mol_type = other DNA

SEQ ID NO: 18907 - DNA, 138 bp, synthetic construct
  source 1..138: mol_type = other DNA
gtaacggcagacttctccacgttttagagctagaaatagcaagttaaaataaggctagtccgttatcaacttgaaaaagtggcaccgagtcggtgcacagacaccatggtgcatctgactcctgaggagaagtctgcc

SEQ ID NO: 18908 - DNA, 138 bp, synthetic construct; identical to SEQ ID NO: 18907
  source 1..138: mol_type = other DNA

SEQ ID NO: 18909 - DNA, 138 bp, synthetic construct; identical to SEQ ID NO: 18907
  source 1..138: mol_type = other DNA

SEQ ID NO: 18910 - DNA, 138 bp, synthetic construct; identical to SEQ ID NO: 18907
  source 1..138: mol_type = other DNA

SEQ ID NO: 18911 - DNA, 141 bp, synthetic construct
  source 1..141: mol_type = other DNA
ggcagtaacggcagacttctccagttttagtactctggaaacagaatctactaaaacaaggcaaaatgccgtgtttatctcgtcaacttgttggcgagacagacaccatggtgcatctgactcctgaggagaagtctgccg

SEQ ID NO: 18912 - DNA, 139 bp, synthetic construct
  source 1..139: mol_type = other DNA
cagtaacggcagacttctccagttttagtactctggaaacagaatctactaaaacaaggcaaaatgccgtgtttatctcgtcaacttgttggcgagacagacaccatggtgcatctgactcctgaggagaagtctgccg

SEQ ID NO: 18913 - DNA, 139 bp, synthetic construct
  source 1..139: mol_type = other DNA
catggtgcatctgactcctgtgttttagtactctggaaacagaatctactaaaacaaggcaaaatgccgtgtttatctcgtcaacttgttggcgagacacagggcagtaacggcagacttctcctcaggagtcagatgc

SEQ ID NO: 18914 - DNA, 139 bp, synthetic construct; identical to SEQ ID NO: 18912
  source 1..139: mol_type = other DNA

SEQ ID NO: 18915 - DNA, 139 bp, synthetic construct; identical to SEQ ID NO: 18912
  source 1..139: mol_type = other DNA

SEQ ID NO: 18916 - DNA, 139 bp, synthetic construct; identical to SEQ ID NO: 18913
  source 1..139: mol_type = other DNA

SEQ ID NO: 18917 - DNA, 138 bp, synthetic construct
  source 1..138: mol_type = other DNA
agtaacggcagacttctccagttttagagctagaaatagcaagttaaaataaggctagtccgttatcaacttgaaaaagtggcaccgagtcggtgccagacaccatggtgcatctgactcctgaggagaagtctgccg

SEQ ID NO: 18918 - DNA, 138 bp, synthetic construct; identical to SEQ ID NO: 18917
  source 1..138: mol_type = other DNA

SEQ ID NO: 18919 - DNA, 138 bp, synthetic construct
  source 1..138: mol_type = other DNA
atggtgcatctgactcctgtgttttagagctagaaatagcaagttaaaataaggctagtccgttatcaacttgaaaaagtggcaccgagtcggtgccacagggcagtaacggcagacttctcctcaggagtcagatgc

SEQ ID NO: 18920 - DNA, 138 bp, synthetic construct; identical to SEQ ID NO: 18919
  source 1..138: mol_type = other DNA

SEQ ID NO: 18921 - DNA, 141 bp, synthetic construct
  source 1..141: mol_type = other DNA
caccatggtgcatctgactcctggttttagtactctggaaacagaatctactaaaacaaggcaaaatgccgtgtttatctcgtcaacttgttggcgagaacagggcagtaacggcagacttctcctcaggagtcagatgca

SEQ ID NO: 18922 - DNA, 139 bp, synthetic construct
  source 1..139: mol_type = other DNA
ccatggtgcatctgactcctggttttagtactctggaaacagaatctactaaaacaaggcaaaatgccgtgtttatctcgtcaacttgttggcgagaacagggcagtaacggcagacttctcctcaggagtcagatgca

SEQ ID NO: 18923 - DNA, 139 bp, synthetic construct
  source 1..139: mol_type = other DNA
gcagtaacggcagacttctccgttttagtactctggaaacagaatctactaaaacaaggcaaaatgccgtgtttatctcgtcaacttgttggcgagaagacaccatggtgcatctgactcctgaggagaagtctgccgt

SEQ ID NO: 18924 - DNA, 139 bp, synthetic construct; identical to SEQ ID NO: 18923
  source 1..139: mol_type = other DNA

SEQ ID NO: 18925 - DNA, 138 bp, synthetic construct
  source 1..138: mol_type = other DNA
catggtgcatctgactcctggttttagagctagaaatagcaagttaaaataaggctagtccgttatcaacttgaaaaagtggcaccgagtcggtgcacagggcagtaacggcagacttctcctcaggagtcagatgca

SEQ ID NO: 18926 - DNA, 138 bp, synthetic construct; identical to SEQ ID NO: 18925
  source 1..138: mol_type = other DNA

SEQ ID NO: 18927 - DNA, 138 bp, synthetic construct; identical to SEQ ID NO: 18925
  source 1..138: mol_type = other DNA

SEQ ID NO: 18928 - DNA, 138 bp, synthetic construct; identical to SEQ ID NO: 18925
  source 1..138: mol_type = other DNA

SEQ ID NO: 18929 - DNA, 138 bp, synthetic construct
  source 1..138: mol_type = other DNA
cagtaacggcagacttctccgttttagagctagaaatagcaagttaaaataaggctagtccgttatcaacttgaaaaagtggcaccgagtcggtgcagacaccatggtgcatctgactcctgaggagaagtctgccgt

SEQ ID NO: 18930 - DNA, 141 bp, synthetic construct
  source 1..141: mol_type = other DNA
acaccatggtgcatctgactcctgttttagtactctggaaacagaatctactaaaacaaggcaaaatgccgtgtttatctcgtcaacttgttggcgagacagggcagtaacggcagacttctcctcaggagtcagatgcac

SEQ ID NO: 18931 - DNA, 139 bp, synthetic construct
  source 1..139: mol_type = other DNA
accatggtgcatctgactcctgttttagtactctggaaacagaatctactaaaacaaggcaaaatgccgtgtttatctcgtcaacttgttggcgagacagggcagtaacggcagacttctcctcaggagtcagatgcac

SEQ ID NO: 18932 - DNA, 139 bp, synthetic construct
  source 1..139: mol_type = other DNA
ggcagtaacggcagacttctcgttttagtactctggaaacagaatctactaaaacaaggcaaaatgccgtgtttatctcgtcaacttgttggcgagagacaccatggtgcatctgactcctgaggagaagtctgccgtt

SEQ ID NO: 18933 - DNA, 139 bp, synthetic construct; identical to SEQ ID NO: 18931
  source 1..139: mol_type = other DNA

SEQ ID NO: 18934 - DNA, 139 bp, synthetic construct; identical to SEQ ID NO: 18931
  source 1..139: mol_type = other DNA

SEQ ID NO: 18935 - DNA, 138 bp, synthetic construct
  source 1..138: mol_type = other DNA
ccatggtgcatctgactcctgttttagagctagaaatagcaagttaaaataaggctagtccgttatcaacttgaaaaagtggcaccgagtcggtgccagggcagtaacggcagacttctcctcaggagtcagatgcac

SEQ ID NO: 18936 - DNA, 138 bp, synthetic construct; identical to SEQ ID NO: 18935
  source 1..138: mol_type = other DNA

SEQ ID NO: 18937 - DNA, 138 bp, synthetic construct
  source 1..138: mol_type = other DNA
gcagtaacggcagacttctcgttttagagctagaaatagcaagttaaaataaggctagtccgttatcaacttgaaaaagtggcaccgagtcggtgcgacaccatggtgcatctgactcctgaggagaagtctgccgtt

SEQ ID NO: 18938 - DNA, 139 bp, synthetic construct
  source 1..139: mol_type = other DNA
caccatggtgcatctgactccgttttagtactctggaaacagaatctactaaaacaaggcaaaatgccgtgtttatctcgtcaacttgttggcgagaagggcagtaacggcagacttctcctcaggagtcagatgcacc

SEQ ID NO: 18939 - DNA, 138 bp, synthetic construct
  source 1..138: mol_type = other DNA
accatggtgcatctgactccgttttagagctagaaatagcaagttaaaataaggctagtccgttatcaacttgaaaaagtggcaccgagtcggtgcagggcagtaacggcagacttctcctcaggagtcagatgcacc

SEQ ID NO: 18940 - DNA, 138 bp, synthetic construct; identical to SEQ ID NO: 18939
  source 1..138: mol_type = other DNA

SEQ ID NO: 18941 - DNA, 138 bp, synthetic construct
  source 1..138: mol_type = other DNA
ggcagtaacggcagacttctgttttagagctagaaatagcaagttaaaataaggctagtccgttatcaacttgaaaaagtggcaccgagtcggtgcacaccatggtgcatctgactcctgaggagaagtctgccgtta

SEQ ID NO: 18942 - DNA, 138 bp, synthetic construct
  source 1..138: mol_type = other DNA
caccatggtgcatctgactcgttttagagctagaaatagcaagttaaaataaggctagtccgttatcaacttgaaaaagtggcaccgagtcggtgcgggcagtaacggcagacttctcctcaggagtcagatgcacca

SEQ ID NO: 18943 - DNA, 138 bp, synthetic construct; identical to SEQ ID NO: 18942
  source 1..138: mol_type = other DNA

SEQ ID NO: 18944 - DNA, 138 bp, synthetic construct
  source 1..138: mol_type = other DNA
gggcagtaacggcagacttcgttttagagctagaaatagcaagttaaaataaggctagtccgttatcaacttgaaaaagtggcaccgagtcggtgccaccatggtgcatctgactcctgaggagaagtctgccgttac

SEQ ID NO: 18945 - DNA, 212 bp, synthetic construct
  source 1..212: mol_type = other DNA
acagggcagtaacggcagacttcgctatagttccttactgaaaggtaagttgctatagtaagggcaacagacccgaggcgttggggatcgcctagcccgtgtttacgggctctccccatattcaaaataatgacagacgagcaccttggagcatttatctccgaggtgctcaccatggtgcatctgactcctgaggagaagtctgccgttac

SEQ ID NO: 18946 - DNA, 212 bp, synthetic construct; identical to SEQ ID NO: 18945
  source 1..212: mol_type = other DNA

SEQ ID NO: 18947 - DNA, 138 bp, synthetic construct
  source 1..138: mol_type = other DNA
agggcagtaacggcagacttgttttagagctagaaatagcaagttaaaataaggctagtccgttatcaacttgaaaaagtggcaccgagtcggtgcaccatggtgcatctgactcctgaggagaagtctgccgttact

SEQ ID NO: 18948 - DNA, 138 bp, synthetic construct
  source 1..138: mol_type = other DNA
acaccatggtgcatctgactgttttagagctagaaatagcaagttaaaataaggctagtccgttatcaacttgaaaaagtggcaccgagtcggtgcggcagtaacggcagacttctcctcaggagtcagatgcaccat

SEQ ID NO: 18949 - DNA, 138 bp, synthetic construct
  source 1..138: mol_type = other DNA
cagggcagtaacggcagactgttttagagctagaaatagcaagttaaaataaggctagtccgttatcaacttgaaaaagtggcaccgagtcggtgcccatggtgcatctgactcctgaggagaagtctgccgttactg

SEQ ID NO: 18950 - DNA, 138 bp, synthetic construct
  source 1..138: mol_type = other DNA
gacaccatggtgcatctgacgttttagagctagaaatagcaagttaaaataaggctagtccgttatcaacttgaaaaagtggcaccgagtcggtgcgcagtaacggcagacttctcctcaggagtcagatgcaccatg

SEQ ID NO: 18951 - DNA, 212 bp, synthetic construct
  source 1..212: mol_type = other DNA
ccacagggcagtaacggcagactgctatagttccttactgaaaggtaagttgctatagtaagggcaacagacccgaggcgttggggatcgcctagcccgtgtttacgggctctccccatattcaaaataatgacagacgagcaccttggagcatttatctccgaggtgctccatggtgcatctgactcctgaggagaagtctgccgttactg

SEQ ID NO: 18952 - DNA, 187 bp, synthetic construct
  source 1..187: mol_type = other DNA
ccccacagggcagtaacggcagacgttgtagctccctttctcatttcggaaacgaaatgagaaccgttgctacaataaggccgtctgaaaagatgtgccgcaacgctctgccccttaaagcttctgctttaaggggcatcgtttacatggtgcatctgactcctgaggagaagtctgccgttactgc

SEQ ID NO: 18953 - DNA, 138 bp, synthetic construct
  source 1..138: mol_type = other DNA
acagggcagtaacggcagacgttttagagctagaaatagcaagttaaaataaggctagtccgttatcaacttgaaaaagtggcaccgagtcggtgccatggtgcatctgactcctgaggagaagtctgccgttactgc

SEQ ID NO: 18954 - DNA, 138 bp, synthetic construct
  source 1..138: mol_type = other DNA
agacaccatggtgcatctgagttttagagctagaaatagcaagttaaaataaggctagtccgttatcaacttgaaaaagtggcaccgagtcggtgccagtaacggcagacttctcctcaggagtcagatgcaccatgg

SEQ ID NO: 18955 - DNA, 212 bp, synthetic construct
  source 1..212: mol_type = other DNA
cccacagggcagtaacggcagacgctatagttccttactgaaaggtaagttgctatagtaagggcaacagacccgaggcgttggggatcgcctagcccgtgtttacgggctctccccatattcaaaataatgacagacgagcaccttggagcatttatctccgaggtgctcatggtgcatctgactcctgaggagaagtctgccgttactgc

SEQ ID NO: 18956 - DNA, 138 bp, synthetic construct
  source 1..138: mol_type = other DNA
cacagggcagtaacggcagagttttagagctagaaatagcaagttaaaataaggctagtccgttatcaacttgaaaaagtggcaccgagtcggtgcatggtgcatctgactcctgaggagaagtctgccgttactgcc

SEQ ID NO: 18957 - DNA, 138 bp, synthetic construct
  source 1..138: mol_type = other DNA
cagacaccatggtgcatctggttttagagctagaaatagcaagttaaaataaggctagtccgttatcaacttgaaaaagtggcaccgagtcggtgcagtaacggcagacttctcctcaggagtcagatgcaccatggt

SEQ ID NO: 18958 - DNA, 212 bp, synthetic construct
  source 1..212: mol_type = other DNA
aaacagacaccatggtgcatctggctatagttccttactgaaaggtaagttgctatagtaagggcaacagacccgaggcgttggggatcgcctagcccgtgtttacgggctctccccatattcaaaataatgacagacgagcaccttggagcatttatctccgaggtgctagtaacggcagacttctcctcaggagtcagatgcaccatggt

SEQ ID NO: 18959 - DNA, 212 bp, synthetic construct; identical to SEQ ID NO: 18958
  source 1..212: mol_type = other DNA

SEQ ID NO: 18960 - DNA, 187 bp, synthetic construct
  source 1..187: mol_type = other DNA
tcaaacagacaccatggtgcatctgttgtagctccctttctcatttcggaaacgaaatgagaaccgttgctacaataaggccgtctgaaaagatgtgccgcaacgctctgccccttaaagcttctgctttaaggggcatcgtttagtaacggcagacttctcctcaggagtcagatgcaccatggtg

SEQ ID NO: 18961 - DNA, 138 bp, synthetic construct
  source 1..138: mol_type = other DNA
acagacaccatggtgcatctgttttagagctagaaatagcaagttaaaataaggctagtccgttatcaacttgaaaaagtggcaccgagtcggtgcgtaacggcagacttctcctcaggagtcagatgcaccatggtg

SEQ ID NO: 18962 - DNA, 138 bp, synthetic construct
  source 1..138: mol_type = other DNA
ccacagggcagtaacggcaggttttagagctagaaatagcaagttaaaataaggctagtccgttatcaacttgaaaaagtggcaccgagtcggtgctggtgcatctgactcctgaggagaagtctgccgttactgccc

SEQ ID NO: 18963 - DNA, 212 bp, synthetic construct
  source 1..212: mol_type = other DNA
caaacagacaccatggtgcatctgctatagttccttactgaaaggtaagttgctatagtaagggcaacagacccgaggcgttggggatcgcctagcccgtgtttacgggctctccccatattcaaaataatgacagacgagcaccttggagcatttatctccgaggtgctgtaacggcagacttctcctcaggagtcagatgcaccatggtg

SEQ ID NO: 18964 - DNA, 212 bp, synthetic construct
  source 1..212: mol_type = other DNA
gccccacagggcagtaacggcaggctatagttccttactgaaaggtaagttgctatagtaagggcaacagacccgaggcgttggggatcgcctagcccgtgtttacgggctctccccatattcaaaataatgacagacgagcaccttggagcatttatctccgaggtgcttggtgcatctgactcctgaggagaagtctgccgttactgccc

SEQ ID NO: 18965 - DNA, 212 bp, synthetic construct; identical to SEQ ID NO: 18963
  source 1..212: mol_type = other DNA

SEQ ID NO: 18966 - DNA, 138 bp, synthetic construct
  source 1..138: mol_type = other DNA
aacagacaccatggtgcatcgttttagagctagaaatagcaagttaaaataaggctagtccgttatcaacttgaaaaagtggcaccgagtcggtgctaacggcagacttctcctcaggagtcagatgcaccatggtgt

SEQ ID NO: 18967 - DNA, 138 bp, synthetic construct
  source 1..138: mol_type = other DNA
cccacagggcagtaacggcagttttagagctagaaatagcaagttaaaataaggctagtccgttatcaacttgaaaaagtggcaccgagtcggtgcggtgcatctgactcctgaggagaagtctgccgttactgccct

SEQ ID NO: 18968 - DNA, 138 bp, synthetic construct; identical to SEQ ID NO: 18966
  source 1..138: mol_type = other DNA

SEQ ID NO: 18969 - DNA, 138 bp, synthetic construct
  source 1..138: mol_type = other DNA
aaacagacaccatggtgcatgttttagagctagaaatagcaagttaaaataaggctagtccgttatcaacttgaaaaagtggcaccgagtcggtgcaacggcagacttctcctcaggagtcagatgcaccatggtgtc

SEQ ID NO: 18970 - DNA, 138 bp, synthetic construct; identical to SEQ ID NO: 18969
  source 1..138: mol_type = other DNA

SEQ ID NO: 18971 - DNA, 138 bp, synthetic construct
  source 1..138: mol_type = other DNA
ccccacagggcagtaacggcgttttagagctagaaatagcaagttaaaataaggctagtccgttatcaacttgaaaaagtggcaccgagtcggtgcgtgcatctgactcctgaggagaagtctgccgttactgccctg

SEQ ID NO: 18972 - DNA, 138 bp, synthetic construct; identical to SEQ ID NO: 18971
  source 1..138: mol_type = other DNA

SEQ ID NO: 18973 - DNA, 212 bp, synthetic construct
  source 1..212: mol_type = other DNA
ctcaaacagacaccatggtgcatgctatagttccttactgaaaggtaagttgctatagtaagggcaacagacccgaggcgttggggatcgcctagcccgtgtttacgggctctccccatattcaaaataatgacagacgagcaccttggagcatttatctccgaggtgctaacggcagacttctcctcaggagtcagatgcaccatggtgtc

SEQ ID NO: 18974 - DNA, 139 bp, synthetic construct
  source 1..139: mol_type = other DNA
tcaaacagacaccatggtgcagttttagtactctggaaacagaatctactaaaacaaggcaaaatgccgtgtttatctcgtcaacttgttggcgagaacggcagacttctcctcaggagtcagatgcaccatggtgtct

SEQ ID NO: 18975 - DNA, 138 bp, synthetic construct
  source 1..138: mol_type = other DNA
gccccacagggcagtaacgggttttagagctagaaatagcaagttaaaataaggctagtccgttatcaacttgaaaaagtggcaccgagtcggtgctgcatctgactcctgaggagaagtctgccgttactgccctgt

SEQ ID NO: 18976 - DNA, 138 bp, synthetic construct; identical to SEQ ID NO: 18975
  source 1..138: mol_type = other DNA

SEQ ID NO: 18977 - DNA, 138 bp, synthetic construct
  source 1..138: mol_type = other DNA
caaacagacaccatggtgcagttttagagctagaaatagcaagttaaaataaggctagtccgttatcaacttgaaaaagtggcaccgagtcggtgcacggcagacttctcctcaggagtcagatgcaccatggtgtct

SEQ ID NO: 18978 - DNA, 212 bp, synthetic construct
  source 1..212: mol_type = other DNA
cttgccccacagggcagtaacgggctatagttccttactgaaaggtaagttgctatagtaagggcaacagacccgaggcgttggggatcgcctagcccgtgtttacgggctctccccatattcaaaataatgacagacgagcaccttggagcatttatctccgaggtgcttgcatctgactcctgaggagaagtctgccgttactgccctgt

SEQ ID NO: 18979 - DNA, 139 bp, synthetic construct
  source 1..139: mol_type = other DNA
ttgccccacagggcagtaacggttttagtactctggaaacagaatctactaaaacaaggcaaaatgccgtgtttatctcgtcaacttgttggcgagagcatctgactcctgaggagaagtctgccgttactgccctgtg

SEQ ID NO: 18980 - DNA, 139 bp, synthetic construct; identical to SEQ ID NO: 18979
  source 1..139: mol_type = other DNA

SEQ ID NO: 18981 - DNA, 138 bp, synthetic construct
  source 1..138: mol_type = other DNA
tgccccacagggcagtaacggttttagagctagaaatagcaagttaaaataaggctagtccgttatcaacttgaaaaagtggcaccgagtcggtgcgcatctgactcctgaggagaagtctgccgttactgccctgtg

SEQ ID NO: 18982 - DNA, 138 bp, synthetic construct
  source 1..138: mol_type = other DNA
tcaaacagacaccatggtgcgttttagagctagaaatagcaagttaaaataaggctagtccgttatcaacttgaaaaagtggcaccgagtcggtgccggcagacttctcctcaggagtcagatgcaccatggtgtctg

SEQ ID NO: 18983 - DNA, 139 bp, synthetic construct
  source 1..139: mol_type = other DNA
cttgccccacagggcagtaacgttttagtactctggaaacagaatctactaaaacaaggcaaaatgccgtgtttatctcgtcaacttgttggcgagacatctgactcctgaggagaagtctgccgttactgccctgtgg

SEQ ID NO: 18984 - DNA, 138 bp, synthetic construct
  source 1..138: mol_type = other DNA
ttgccccacagggcagtaacgttttagagctagaaatagcaagttaaaataaggctagtccgttatcaacttgaaaaagtggcaccgagtcggtgccatctgactcctgaggagaagtctgccgttactgccctgtgg

SEQ ID NO: 18985 - DNA, 138 bp, synthetic construct; identical to SEQ ID NO: 18984
  source 1..138: mol_type = other DNA

SEQ ID NO: 18986 - DNA, 138 bp, synthetic construct
  source 1..138: mol_type = other DNA
ctcaaacagacaccatggtggttttagagctagaaatagcaagttaaaataaggctagtccgttatcaacttgaaaaagtggcaccgagtcggtgcggcagacttctcctcaggagtcagatgcaccatggtgtctgt

SEQ ID NO: 18987 - DNA, 138 bp, synthetic construct
  source 1..138: mol_type = other DNA
cttgccccacagggcagtaagttttagagctagaaatagcaagttaaaataaggctagtccgttatcaacttgaaaaagtggcaccgagtcggtgcatctgactcctgaggagaagtctgccgttactgccctgtggg

SEQ ID NO: 18988 - DNA, 138 bp, synthetic construct; identical to SEQ ID NO: 18987
  source 1..138: mol_type = other DNA

SEQ ID NO: 18989 - DNA, 138 bp, synthetic construct; identical to SEQ ID NO: 18987
  source 1..138: mol_type = other DNA

SEQ ID NO: 18990 - DNA, 138 bp, synthetic construct; identical to SEQ ID NO: 18987
  source 1..138: mol_type = other DNA

SEQ ID NO: 18991 - DNA, 138 bp, synthetic construct
  source 1..138: mol_type = other DNA
cctcaaacagacaccatggtgttttagagctagaaatagcaagttaaaataaggctagtccgttatcaacttgaaaaagtggcaccgagtcggtgcgcagacttctcctcaggagtcagatgcaccatggtgtctgtt

SEQ ID NO: 18992 - DNA, 212 bp, synthetic construct
  source 1..212: mol_type = other DNA
caacctcaaacagacaccatggtgctatagttccttactgaaaggtaagttgctatagtaagggcaacagacccgaggcgttggggatcgcctagcccgtgtttacgggctctccccatattcaaaataatgacagacgagcaccttggagcatttatctccgaggtgctgcagacttctcctcaggagtcagatgcaccatggtgtctgtt

SEQ ID NO: 18993 - DNA, 212 bp, synthetic construct; identical to SEQ ID NO: 18992
  source 1..212: mol_type = other DNA

SEQ ID NO: 18994 - DNA, 139 bp, synthetic construct
  source 1..139: mol_type = other DNA
accttgccccacagggcagtagttttagtactctggaaacagaatctactaaaacaaggcaaaatgccgtgtttatctcgtcaacttgttggcgagatctgactcctgaggagaagtctgccgttactgccctgtgggg

SEQ ID NO: 18995 - DNA, 139 bp, synthetic construct; identical to SEQ ID NO: 18994
  source 1..139: mol_type = other DNA

SEQ ID NO: 18996 - DNA, 138 bp, synthetic construct
  source 1..138: mol_type = other DNA
ccttgccccacagggcagtagttttagagctagaaatagcaagttaaaataaggctagtccgttatcaacttgaaaaagtggcaccgagtcggtgctctgactcctgaggagaagtctgccgttactgccctgtgggg

SEQ ID NO: 18997 - DNA, 138 bp, synthetic construct; identical to SEQ ID NO: 18996
  source 1..138: mol_type = other DNA

SEQ ID NO: 18998 - DNA, 138 bp, synthetic construct
  source 1..138: mol_type = other DNA
acctcaaacagacaccatgggttttagagctagaaatagcaagttaaaataaggctagtccgttatcaacttgaaaaagtggcaccgagtcggtgccagacttctcctcaggagtcagatgcaccatggtgtctgttt

SEQ ID NO: 18999 - DNA, 138 bp, synthetic construct; identical to SEQ ID NO: 18998
  source 1..138: mol_type = other DNA

SEQ ID NO: 19000 - DNA, 212 bp, synthetic construct
  source 1..212: mol_type = other DNA
tcaccttgccccacagggcagtagctatagttccttactgaaaggtaagttgctatagtaagggcaacagacccgaggcgttggggatcgcctagcccgtgtttacgggctctccccatattcaaaataatgacagacgagcaccttggagcatttatctccgaggtgcttctgactcctgaggagaagtctgccgttactgccctgtgggg

SEQ ID NO: 19001 - DNA, 212 bp, synthetic construct; identical to SEQ ID NO: 19000
  source 1..212: mol_type = other DNA

SEQ ID NO: 19002 - DNA, 139 bp, synthetic construct
  source 1..139: mol_type = other DNA
caccttgccccacagggcagtgttttagtactctggaaacagaatctactaaaacaaggcaaaatgccgtgtttatctcgtcaacttgttggcgagactgactcctgaggagaagtctgccgttactgccctgtggggc

SEQ ID NO: 19003 - DNA, 138 bp, synthetic construct
  source 1..138: mol_type = other DNA
aacctcaaacagacaccatggttttagagctagaaatagcaagttaaaataaggctagtccgttatcaacttgaaaaagtggcaccgagtcggtgcagacttctcctcaggagtcagatgcaccatggtgtctgtttg

SEQ ID NO: 19004 - DNA, 138 bp, synthetic construct; identical to SEQ ID NO: 19003
  source 1..138: mol_type = other DNA

SEQ ID NO: 19005 - DNA, 138 bp, synthetic construct
  source 1..138: mol_type = other DNA
accttgccccacagggcagtgttttagagctagaaatagcaagttaaaataaggctagtccgttatcaacttgaaaaagtggcaccgagtcggtgcctgactcctgaggagaagtctgccgttactgccctgtggggc

SEQ ID NO: 19006 - DNA, 138 bp, synthetic construct
  source 1..138: mol_type = other DNA
caacctcaaacagacaccatgttttagagctagaaatagcaagttaaaataaggctagtccgttatcaacttgaaaaagtggcaccgagtcggtgcgacttctcctcaggagtcagatgcaccatggtgtctgtttga

SEQ ID NO: 19007 - DNA, 138 bp, synthetic construct
  source 1..138: mol_type = other DNA
caccttgccccacagggcaggttttagagctagaaatagcaagttaaaataaggctagtccgttatcaacttgaaaaagtggcaccgagtcggtgctgactcctgaggagaagtctgccgttactgccctgtggggca

SEQ ID NO: 19008 - DNA, 138 bp, synthetic construct; identical to SEQ ID NO: 19006
  source 1..138: mol_type = other DNA

SEQ ID NO: 19009 - DNA, 212 bp, synthetic construct
  source 1..212: mol_type = other DNA
tagcaacctcaaacagacaccatgctatagttccttactgaaaggtaagttgctatagtaagggcaacagacccgaggcgttggggatcgcctagcccgtgtttacgggctctccccatattcaaaataatgacagacgagcaccttggagcatttatctccgaggtgctgacttctcctcaggagtcagatgcaccatggtgtctgtttga

SEQ ID NO: 19010 - DNA, 138 bp, synthetic construct
  source 1..138: mol_type = other DNA
gcaacctcaaacagacaccagttttagagctagaaatagcaagttaaaataaggctagtccgttatcaacttgaaaaagtggcaccgagtcggtgcacttctcctcaggagtcagatgcaccatggtgtctgtttgag

SEQ ID NO: 19011 - DNA, 138 bp, synthetic construct; identical to SEQ ID NO: 19010
  source 1..138: mol_type = other DNA

SEQ ID NO: 19012 - DNA, 138 bp, synthetic construct; identical to SEQ ID NO: 19010
  source 1..138: mol_type = other DNA

SEQ ID NO: 19013 - DNA, 138 bp, synthetic construct; identical to SEQ ID NO: 19010
  source 1..138: mol_type = other DNA

SEQ ID NO: 19014 - DNA, 138 bp, synthetic construct
  source 1..138: mol_type = other DNA
tcaccttgccccacagggcagttttagagctagaaatagcaagttaaaataaggctagtccgttatcaacttgaaaaagtggcaccgagtcggtgcgactcctgaggagaagtctgccgttactgccctgtggggcaa

SEQ ID NO: 19015 - DNA, 212 bp, synthetic construct
  source 1..212: mol_type = other DNA
cgttcaccttgccccacagggcagctatagttccttactgaaaggtaagttgctatagtaagggcaacagacccgaggcgttggggatcgcctagcccgtgtttacgggctctccccatattcaaaataatgacagacgagcaccttggagcatttatctccgaggtgctgactcctgaggagaagtctgccgttactgccctgtggggcaa

SEQ ID NO: 19016 - DNA, 139 bp, synthetic construct
  source 1..139: mol_type = other DNA
gttcaccttgccccacagggcgttttagtactctggaaacagaatctactaaaacaaggcaaaatgccgtgtttatctcgtcaacttgttggcgagaactcctgaggagaagtctgccgttactgccctgtggggcaag

SEQ ID NO: 19017 - DNA, 139 bp, synthetic construct
  source 1..139: mol_type = other DNA
tagcaacctcaaacagacaccgttttagtactctggaaacagaatctactaaaacaaggcaaaatgccgtgtttatctcgtcaacttgttggcgagacttctcctcaggagtcagatgcaccatggtgtctgtttgagg

SEQ ID NO: 19018 - DNA, 139 bp, synthetic construct; identical to SEQ ID NO: 19017
  source 1..139: mol_type = other DNA

SEQ ID NO: 19019 - DNA, 138 bp, synthetic construct
  source 1..138: mol_type = other DNA
agcaacctcaaacagacaccgttttagagctagaaatagcaagttaaaataaggctagtccgttatcaacttgaaaaagtggcaccgagtcggtgccttctcctcaggagtcagatgcaccatggtgtctgtttgagg

SEQ ID NO: 19020 - DNA, 138 bp, synthetic construct; identical to SEQ ID NO: 19019
  source 1..138: mol_type = other DNA

SEQ ID NO: 19021 - DNA, 138 bp, synthetic construct
  source 1..138: mol_type = other DNA
ttcaccttgccccacagggcgttttagagctagaaatagcaagttaaaataaggctagtccgttatcaacttgaaaaagtggcaccgagtcggtgcactcctgaggagaagtctgccgttactgccctgtggggcaag

SEQ ID NO: 19022 - DNA, 138 bp, synthetic construct; identical to SEQ ID NO: 19021
  source 1..138: mol_type = other DNA

SEQ ID NO: 19023 - DNA, 139 bp, synthetic construct
  source 1..139: mol_type = other DNA
ctagcaacctcaaacagacacgttttagtactctggaaacagaatctactaaaacaaggcaaaatgccgtgtttatctcgtcaacttgttggcgagattctcctcaggagtcagatgcaccatggtgtctgtttgaggt

SEQ ID NO: 19024 - DNA, 139 bp, synthetic construct; identical to SEQ ID NO: 19023
  source 1..139: mol_type = other DNA

SEQ ID NO: 19025 - DNA, 138 bp, synthetic construct
  source 1..138: mol_type = other DNA
gttcaccttgccccacaggggttttagagctagaaatagcaagttaaaataaggctagtccgttatcaacttgaaaaagtggcaccgagtcggtgcctcctgaggagaagtctgccgttactgccctgtggggcaagg

SEQ ID NO: 19026 - DNA, 138 bp, synthetic construct; identical to SEQ ID NO: 19025
  source 1..138: mol_type = other DNA

SEQ ID NO: 19027 - DNA, 138 bp, synthetic construct
  source 1..138: mol_type = other DNA
tagcaacctcaaacagacacgttttagagctagaaatagcaagttaaaataaggctagtccgttatcaacttgaaaaagtggcaccgagtcggtgcttctcctcaggagtcagatgcaccatggtgtctgtttgaggt

SEQ ID NO: 19028 - DNA, 139 bp, synthetic construct
  source 1..139: mol_type = other DNA
acgttcaccttgccccacagggttttagtactctggaaacagaatctactaaaacaaggcaaaatgccgtgtttatctcgtcaacttgttggcgagatcctgaggagaagtctgccgttactgccctgtggggcaaggt

SEQ ID NO: 19029 - DNA, 138 bp, synthetic construct
  source 1..138: mol_type = other DNA
cgttcaccttgccccacagggttttagagctagaaatagcaagttaaaataaggctagtccgttatcaacttgaaaaagtggcaccgagtcggtgctcctgaggagaagtctgccgttactgccctgtggggcaaggt

SEQ ID NO: 19030 - DNA, 138 bp, synthetic construct
  source 1..138: mol_type = other DNA
ctagcaacctcaaacagacagttttagagctagaaatagcaagttaaaataaggctagtccgttatcaacttgaaaaagtggcaccgagtcggtgctctcctcaggagtcagatgcaccatggtgtctgtttgaggtt

SEQ ID NO: 19031 - DNA, 139 bp, synthetic construct
  source 1..139: mol_type = other DNA
cacgttcaccttgccccacaggttttagtactctggaaacagaatctactaaaacaaggcaaaatgccgtgtttatctcgtcaacttgttggcgagacctgaggagaagtctgccgttactgccctgtggggcaaggtg

SEQ ID NO: 19032 - DNA, 139 bp, synthetic construct; identical to SEQ ID NO: 19031
  source 1..139: mol_type = other DNA

SEQ ID NO: 19033 - DNA, 138 bp, synthetic construct
  source 1..138: mol_type = other DNA
acgttcaccttgccccacaggttttagagctagaaatagcaagttaaaataaggctagtccgttatcaacttgaaaaagtggcaccgagtcggtgccctgaggagaagtctgccgttactgccctgtggggcaaggtg

SEQ ID NO: 19034 - DNA, 138 bp, synthetic construct; identical to SEQ ID NO: 19033
  source 1..138: mol_type = other DNA

SEQ ID NO: 19035 - DNA, 138 bp, synthetic construct
  source 1..138: mol_type = other DNA
actagcaacctcaaacagacgttttagagctagaaatagcaagttaaaataaggctagtccgttatcaacttgaaaaagtggcaccgagtcggtgcctcctcaggagtcagatgcaccatggtgtctgtttgaggttg

SEQ ID NO: 19036 - DNA, 138 bp, synthetic construct
  source 1..138: mol_type = other DNA
cacgttcaccttgccccacagttttagagctagaaatagcaagttaaaataaggctagtccgttatcaacttgaaaaagtggcaccgagtcggtgcctgaggagaagtctgccgttactgccctgtggggcaaggtga

SEQ ID NO: 19037 - DNA, 138 bp, synthetic construct; identical to SEQ ID NO: 19036
  source 1..138: mol_type = other DNA

SEQ ID NO: 19038 - DNA, 138 bp, synthetic construct; identical to SEQ ID NO: 19036
  source 1..138: mol_type = other DNA

SEQ ID NO: 19039 - DNA, 138 bp, synthetic construct; identical to SEQ ID NO: 19036
  source 1..138: mol_type = other DNA

SEQ ID NO: 19040 - DNA, 138 bp, synthetic construct
  source 1..138: mol_type = other DNA
cactagcaacctcaaacagagttttagagctagaaatagcaagttaaaataaggctagtccgttatcaacttgaaaaagtggcaccgagtcggtgctcctcaggagtcagatgcaccatggtgtctgtttgaggttgc

SEQ ID NO: 19041 - DNA, 139 bp, synthetic construct
  source 1..139: mol_type = other DNA
tccacgttcaccttgccccacgttttagtactctggaaacagaatctactaaaacaaggcaaaatgccgtgtttatctcgtcaacttgttggcgagatgaggagaagtctgccgttactgccctgtggggcaaggtgaa

SEQ ID NO: 19042 - DNA, 139 bp, synthetic construct; identical to SEQ ID NO: 19041
  source 1..139: mol_type = other DNA

SEQ ID NO: 19043 - DNA, 138 bp, synthetic construct
  source 1..138: mol_type = other DNA
ccacgttcaccttgccccacgttttagagctagaaatagcaagttaaaataaggctagtccgttatcaacttgaaaaagtggcaccgagtcggtgctgaggagaagtctgccgttactgccctgtggggcaaggtgaa

SEQ ID NO: 19044 - DNA, 138 bp, synthetic construct; identical to SEQ ID NO: 19043
  source 1..138: mol_type = other DNA

SEQ ID NO: 19045 - DNA, 138 bp, synthetic construct; identical to SEQ ID NO: 19043
  source 1..138: mol_type = other DNA

SEQ ID NO: 19046 - DNA, 138 bp, synthetic construct; identical to SEQ ID NO: 19043
  source 1..138: mol_type = other DNA

SEQ ID NO: 19047 - DNA, 138 bp, synthetic construct
  source 1..138: mol_type = other DNA
tcactagcaacctcaaacaggttttagagctagaaatagcaagttaaaataaggctagtccgttatcaacttgaaaaagtggcaccgagtcggtgccctcaggagtcagatgcaccatggtgtctgtttgaggttgct

SEQ ID NO: 19048 - DNA, 212 bp, synthetic construct
  source 1..212: mol_type = other DNA
catccacgttcaccttgccccacgctatagttccttactgaaaggtaagttgctatagtaagggcaacagacccgaggcgttggggatcgcctagcccgtgtttacgggctctccccatattcaaaataatgacagacgagcaccttggagcatttatctccgaggtgcttgaggagaagtctgccgttactgccctgtggggcaaggtgaa

SEQ ID NO: 19049 - DNA, 212 bp, synthetic construct
  source 1..212: mol_type = other DNA
tgttcactagcaacctcaaacaggctatagttccttactgaaaggtaagttgctatagtaagggcaacagacccgaggcgttggggatcgcctagcccgtgtttacgggctctccccatattcaaaataatgacagacgagcaccttggagcatttatctccgaggtgctcctcaggagtcagatgcaccatggtgtctgtttgaggttgct

SEQ ID NO: 19050 - DNA, 212 bp, synthetic construct; identical to SEQ ID NO: 19048
  source 1..212: mol_type = other DNA

SEQ ID NO: 19051 - DNA, 212 bp, synthetic construct; identical to SEQ ID NO: 19049
  source 1..212: mol_type = other DNA

SEQ ID NO: 19052 - DNA, 187 bp, synthetic construct
  source 1..187: mol_type = other DNA
tgtgttcactagcaacctcaaacagttgtagctccctttctcatttcggaaacgaaatgagaaccgttgctacaataaggccgtctgaaaagatgtgccgcaacgctctgccccttaaagcttctgctttaaggggcatcgtttactcaggagtcagatgcaccatggtgtctgtttgaggttgcta

SEQ ID NO: 19053 - DNA, 141 bp, synthetic construct
  source 1..141: mol_type = other DNA
tcatccacgttcaccttgccccagttttagtactctggaaacagaatctactaaaacaaggcaaaatgccgtgtttatctcgtcaacttgttggcgagagaggagaagtctgccgttactgccctgtggggcaaggtgaac

SEQ ID NO: 19054 - DNA, 139 bp, synthetic construct
  source 1..139: mol_type = other DNA
atccacgttcaccttgccccagttttagtactctggaaacagaatctactaaaacaaggcaaaatgccgtgtttatctcgtcaacttgttggcgagagaggagaagtctgccgttactgccctgtggggcaaggtgaac

SEQ ID NO: 19055 - DNA, 139 bp, synthetic construct; identical to SEQ ID NO: 19054
  source 1..139: mol_type = other DNA

SEQ ID NO: 19056 - DNA, 139 bp, synthetic construct; identical to SEQ ID NO: 19054
  source 1..139: mol_type = other DNA

SEQ ID NO: 19057 - DNA, 138 bp, synthetic construct
  source 1..138: mol_type = other DNA
tccacgttcaccttgccccagttttagagctagaaatagcaagttaaaataaggctagtccgttatcaacttgaaaaagtggcaccgagtcggtgcgaggagaagtctgccgttactgccctgtggggcaaggtgaac

SEQ ID NO: 19058 - DNA, 138 bp, synthetic construct; identical to SEQ ID NO: 19057
  source 1..138: mol_type = other DNA

SEQ ID NO: 19059 - DNA, 138 bp, synthetic construct
  source 1..138: mol_type = other DNA
ttcactagcaacctcaaacagttttagagctagaaatagcaagttaaaataaggctagtccgttatcaacttgaaaaagtggcaccgagtcggtgcctcaggagtcagatgcaccatggtgtctgtttgaggttgcta

SEQ ID NO: 19060 - DNA, 212 bp, synthetic construct
  source 1..212: mol_type = other DNA
gtgttcactagcaacctcaaacagctatagttccttactgaaaggtaagttgctatagtaagggcaacagacccgaggcgttggggatcgcctagcccgtgtttacgggctctccccatattcaaaataatgacagacgagcaccttggagcatttatctccgaggtgctctcaggagtcagatgcaccatggtgtctgtttgaggttgcta

SEQ ID NO: 19061 - DNA, 212 bp, synthetic construct; identical to SEQ ID NO: 19060
  source 1..212: mol_type = other DNA

SEQ ID NO: 19062 - DNA, 139 bp, synthetic construct
  source 1..139: mol_type = other DNA
catccacgttcaccttgccccgttttagtactctggaaacagaatctactaaaacaaggcaaaatgccgtgtttatctcgtcaacttgttggcgagaaggagaagtctgccgttactgccctgtggggcaaggtgaacg

SEQ ID NO: 19063 - DNA, 139 bp, synthetic construct; identical to SEQ ID NO: 19062
  source 1..139: mol_type = other DNA

SEQ ID NO: 19064 - DNA, 138 bp, synthetic construct
  source 1..138: mol_type = other DNA
gttcactagcaacctcaaacgttttagagctagaaatagcaagttaaaataaggctagtccgttatcaacttgaaaaagtggcaccgagtcggtgctcaggagtcagatgcaccatggtgtctgtttgaggttgctag

SEQ ID NO: 19065 - DNA, 138 bp, synthetic construct; identical to SEQ ID NO: 19064
  source 1..138: mol_type = other DNA

SEQ ID NO: 19066 - DNA, 138 bp, synthetic construct
  source 1..138: mol_type = other DNA
atccacgttcaccttgccccgttttagagctagaaatagcaagttaaaataaggctagtccgttatcaacttgaaaaagtggcaccgagtcggtgcaggagaagtctgccgttactgccctgtggggcaaggtgaacg

SEQ ID NO: 19067 - DNA, 139 bp, synthetic construct
  source 1..139: mol_type = other DNA
tcatccacgttcaccttgcccgttttagtactctggaaacagaatctactaaaacaaggcaaaatgccgtgtttatctcgtcaacttgttggcgagaggagaagtctgccgttactgccctgtggggcaaggtgaacgt

SEQ ID NO: 19068 - DNA, 138 bp, synthetic construct
  source 1..138: mol_type = other DNA
tgttcactagcaacctcaaagttttagagctagaaatagcaagttaaaataaggctagtccgttatcaacttgaaaaagtggcaccgagtcggtgccaggagtcagatgcaccatggtgtctgtttgaggttgctagt

SEQ ID NO: 19069 - DNA, 138 bp, synthetic construct; identical to SEQ ID NO: 19068
  source 1..138: mol_type = other DNA

SEQ ID NO: 19070 - DNA, 138 bp, synthetic construct
  source 1..138: mol_type = other DNA
catccacgttcaccttgcccgttttagagctagaaatagcaagttaaaataaggctagtccgttatcaacttgaaaaagtggcaccgagtcggtgcggagaagtctgccgttactgccctgtggggcaaggtgaacgt

SEQ ID NO: 19071 - DNA, 212 bp, synthetic construct
  source 1..212: mol_type = other DNA
ctgtgttcactagcaacctcaaagctatagttccttactgaaaggtaagttgctatagtaagggcaacagacccgaggcgttggggatcgcctagcccgtgtttacgggctctccccatattcaaaataatgacagacgagcaccttggagcatttatctccgaggtgctcaggagtcagatgcaccatggtgtctgtttgaggttgctagt

SEQ ID NO: 19072 - DNA, 97 bp, synthetic construct
  source 1..97: mol_type = other DNA
gcccagtttctattggtctccgttttagtactctggaaacagaatctactaaaacaaggcaaaatgccgtgtttatctcgtcaacttgttggcgaga

SEQ ID NO: 19073 - DNA, 97 bp, synthetic construct; identical to SEQ ID NO: 19072
  source 1..97: mol_type = other DNA

SEQ ID NO: 19074 - DNA, 96 bp, synthetic construct
  source 1..96: mol_type = other DNA
tctattggtctccttaaaccgttttagagctagaaatagcaagttaaaataaggctagtccgttatcaacttgaaaaagtggcaccgagtcggtgc

SEQ ID NO: 19075 - DNA, 96 bp, synthetic construct
  source 1..96: mol_type = other DNA
ttctattggtctccttaaacgttttagagctagaaatagcaagttaaaataaggctagtccgttatcaacttgaaaaagtggcaccgagtcggtgc

SEQ ID NO: 19076 - DNA, 99 bp, synthetic construct
  source 1..99: mol_type = other DNA
tgtaaccttgataccaacctgccgttttagtactctggaaacagaatctactaaaacaaggcaaaatgccgtgtttatctcgtcaacttgttggcgaga

SEQ ID NO: 19077 - DNA, 97 bp, synthetic construct
  source 1..97: mol_type = other DNA
ttggtctccttaaacctgtctgttttagtactctggaaacagaatctactaaaacaaggcaaaatgccgtgtttatctcgtcaacttgttggcgaga

SEQ ID NO: 19078 - DNA, 99 bp, synthetic construct
  source 1..99: mol_type = other DNA
gagccagggctgggcataaaagtgttttagtactctggaaacagaatctactaaaacaaggcaaaatgccgtgtttatctcgtcaacttgttggcgaga

SEQ ID NO: 19079 - DNA, 97 bp, synthetic construct
  source 1..97: mol_type = other DNA
gagccagggctgggcataaaagttttagtactctggaaacagaatctactaaaacaaggcaaaatgccgtgtttatctcgtcaacttgttggcgaga

SEQ ID NO: 19080 - DNA, 99 bp, synthetic construct; identical to SEQ ID NO: 19078
  source 1..99: mol_type = other DNA

SEQ ID NO: 19081 - DNA, 97 bp, synthetic construct; identical to SEQ ID NO: 19079
  source 1..97: mol_type = other DNA

SEQ ID NO: 19082 - DNA, 96 bp, synthetic construct; identical to SEQ ID NO: 19075
  source 1..96: mol_type = other DNA

SEQ ID NO: 19083 - DNA, 96 bp, synthetic construct; identical to SEQ ID NO: 19074
  source 1..96: mol_type = other DNA

SEQ ID NO: 19084 - DNA, 96 bp, synthetic construct
  source 1..96: mol_type = other DNA
ggagccagggctgggcataagttttagagctagaaatagcaagttaaaataaggctagtccgttatcaacttgaaaaagtggcaccgagtcggtgc

SEQ ID NO: 19085 - DNA, 96 bp, synthetic construct
  source 1..96: mol_type = other DNA
cagggctgggcataaaagtcgttttagagctagaaatagcaagttaaaataaggctagtccgttatcaacttgaaaaagtggcaccgagtcggtgc

SEQ ID NO: 19086 - DNA, 96 bp, synthetic construct
  source 1..96: mol_type = other DNA
gagccagggctgggcataaagttttagagctagaaatagcaagttaaaataaggctagtccgttatcaacttgaaaaagtggcaccgagtcggtgc

SEQ ID NO: 19087 - DNA, 96 bp, synthetic construct; identical to SEQ ID NO: 19086
  source 1..96: mol_type = other DNA

SEQ ID NO: 19088 - DNA, 99 bp, synthetic construct; identical to SEQ ID NO: 19078
  source 1..99: mol_type = other DNA

SEQ ID NO: 19089 - DNA, 97 bp, synthetic construct; identical to SEQ ID NO: 19079
  source 1..97: mol_type = other DNA

SEQ ID NO: 19090 - DNA, 97 bp, synthetic construct; identical to SEQ ID NO: 19077
  source 1..97: mol_type = other DNA

SEQ ID NO: 19091 - DNA, 97 bp, synthetic construct
  source 1..97: mol_type = other DNA
gccagggctgggcataaaagtgttttagtactctggaaacagaatctactaaaacaaggcaaaatgccgtgtttatctcgtcaacttgttggcgaga

SEQ ID NO: 19092 - DNA, 97 bp, synthetic construct
  source 1..97: mol_type = other DNA
agccagggctgggcataaaaggttttagtactctggaaacagaatctactaaaacaaggcaaaatgccgtgtttatctcgtcaacttgttggcgaga

SEQ ID NO: 19093 - DNA, 97 bp, synthetic construct
  source 1..97: mol_type = other DNA
tctccacatgcccagtttctagttttagtactctggaaacagaatctactaaaacaaggcaaaatgccgtgtttatctcgtcaacttgttggcgaga

SEQ ID NO: 19094 - DNA, 96 bp, synthetic construct
  source 1..96: mol_type = other DNA
ccagggctgggcataaaagtgttttagagctagaaatagcaagttaaaataaggctagtccgttatcaacttgaaaaagtggcaccgagtcggtgc

SEQ ID NO: 19095 - DNA, 96 bp, synthetic construct
  source 1..96: mol_type = other DNA
agccagggctgggcataaaagttttagagctagaaatagcaagttaaaataaggctagtccgttatcaacttgaaaaagtggcaccgagtcggtgc

SEQ ID NO: 19096 - DNA, 96 bp, synthetic construct; identical to SEQ ID NO: 19074
  source 1..96: mol_type = other DNA

SEQ ID NO: 19097 - DNA, 96 bp, synthetic construct
  source 1..96: mol_type = other DNA
ctattggtctccttaaacctgttttagagctagaaatagcaagttaaaataaggctagtccgttatcaacttgaaaaagtggcaccgagtcggtgc

SEQ ID NO: 19098 - DNA, 99 bp, synthetic construct; identical to SEQ ID NO: 19076
  source 1..99: mol_type = other DNA

SEQ ID NO: 19099 - DNA, 97 bp, synthetic construct; identical to SEQ ID NO: 19077
  source 1..97: mol_type = other DNA

SEQ ID NO: 19100 - DNA, 97 bp, synthetic construct; identical to SEQ ID NO: 19092
  source 1..97: mol_type = other DNA

SEQ ID NO: 19101 - DNA, 97 bp, synthetic construct; identical to SEQ ID NO: 19092
  source 1..97: mol_type = other DNA

SEQ ID NO: 19102 - DNA, 96 bp, synthetic construct
  source 1..96: mol_type = other DNA
ttggtctccttaaacctgtcgttttagagctagaaatagcaagttaaaataaggctagtccgttatcaacttgaaaaagtggcaccgagtcggtgc

SEQ ID NO: 19103 - DNA, 96 bp, synthetic construct
  source 1..96: mol_type = other DNA
tccacatgcccagtttctatgttttagagctagaaatagcaagttaaaataaggctagtccgttatcaacttgaaaaagtggcaccgagtcggtgc

SEQ ID NO: 19104 - DNA, 96 bp, synthetic construct
  source 1..96: mol_type = other DNA
tattggtctccttaaacctggttttagagctagaaatagcaagttaaaataaggctagtccgttatcaacttgaaaaagtggcaccgagtcggtgc

SEQ ID NO: 19105 - DNA, 96 bp, synthetic construct; identical to SEQ ID NO: 19074
  source 1..96: mol_type = other DNA

SEQ ID NO: 19106 - DNA, 96 bp, synthetic construct
  source 1..96: mol_type = other DNA
gccagggctgggcataaaaggttttagagctagaaatagcaagttaaaataaggctagtccgttatcaacttgaaaaagtggcaccgagtcggtgc

SEQ ID NO: 19107 - DNA, 99 bp, synthetic construct; identical to SEQ ID NO: 19076
  source 1..99: mol_type = other DNA

SEQ ID NO: 19108 - DNA, 97 bp, synthetic construct; identical to SEQ ID NO: 19077
  source 1..97: mol_type = other DNA

SEQ ID NO: 19109 - DNA, 97 bp, synthetic construct; identical to SEQ ID NO: 19091
  source 1..97: mol_type = other DNA

SEQ ID NO: 19110 - DNA, 97 bp, synthetic construct; identical to SEQ ID NO: 19093
  source 1..97: mol_type = other DNA

SEQ ID NO: 19111 - DNA, 97 bp, synthetic construct; identical to SEQ ID NO: 19093
  source 1..97: mol_type = other DNA

SEQ ID NO: 19112 - DNA, 96 bp, synthetic construct; identical to SEQ ID NO: 19102
  source 1..96: mol_type = other DNA

SEQ ID NO: 19113 - DNA, 96 bp, synthetic construct
  source 1..96: mol_type = other DNA
attggtctccttaaacctgtgttttagagctagaaatagcaagttaaaataaggctagtccgttatcaacttgaaaaagtggcaccgagtcggtgc

SEQ ID NO: 19114 - DNA, 96 bp, synthetic construct; identical to SEQ ID NO: 19094
  source 1..96: mol_type = other DNA

SEQ ID NO: 19115 - DNA, 97 bp, synthetic construct; identical to SEQ ID NO: 19077
  source 1..97: mol_type = other DNA

SEQ ID NO: 19116 - DNA, 96 bp, synthetic construct
  source 1..96: mol_type = other DNA
tggtctccttaaacctgtctgttttagagctagaaatagcaagttaaaataaggctagtccgttatcaacttgaaaaagtggcaccgagtcggtgc

SEQ ID NO: 19117 - DNA, 96 bp, synthetic construct; identical to SEQ ID NO: 19102
  source 1..96: mol_type = other DNA

SEQ ID NO: 19118 - DNA, 96 bp, synthetic construct; identical to SEQ ID NO: 19085
  source 1..96: mol_type = other DNA

SEQ ID NO: 19119 - DNA, 96 bp, synthetic construct; identical to SEQ ID NO: 19102
  source 1..96: mol_type = other DNA

SEQ ID NO: 19120 - DNA, 96 bp, synthetic construct; identical to SEQ ID NO: 19116
  source 1..96: mol_type = other DNA

SEQ ID NO: 19121 - DNA, 96 bp, synthetic construct
  source 1..96: mol_type = other DNA
agggctgggcataaaagtcagttttagagctagaaatagcaagttaaaataaggctagtccgttatcaacttgaaaaagtggcaccgagtcggtgc

SEQ ID NO: 19122 - DNA, 170 bp, synthetic construct
  source 1..170: mol_type = other DNA
agccagggctgggcataaaagtcgctatagttccttactgaaaggtaagttgctatagtaagggcaacagacccgaggcgttggggatcgcctagcccgtgtttacgggctctccccatattcaaaataatgacagacgagcaccttggagcatttatctccgaggtgct

SEQ ID NO: 19123 - DNA, 170 bp, synthetic construct; identical to SEQ ID NO: 19122
  source 1..170: mol_type = other DNA

SEQ ID NO: 19124 - DNA, 96 bp, synthetic construct
  source 1..96: mol_type = other DNA
gggctgggcataaaagtcaggttttagagctagaaatagcaagttaaaataaggctagtccgttatcaacttgaaaaagtggcaccgagtcggtgc

SEQ ID NO: 19125 - DNA, 96 bp, synthetic construct
  source 1..96: mol_type = other DNA
ggtctccttaaacctgtcttgttttagagctagaaatagcaagttaaaataaggctagtccgttatcaacttgaaaaagtggcaccgagtcggtgc

SEQ ID NO: 19126 - DNA, 96 bp, synthetic construct
  source 1..96: mol_type = other DNA
ggctgggcataaaagtcagggttttagagctagaaatagcaagttaaaataaggctagtccgttatcaacttgaaaaagtggcaccgagtcggtgc

SEQ ID NO: 19127 - DNA, 96 bp, synthetic construct
  source 1..96: mol_type = other DNA
gtctccttaaacctgtcttggttttagagctagaaatagcaagttaaaataaggctagtccgttatcaacttgaaaaagtggcaccgagtcggtgc

SEQ ID NO: 19128 - DNA, 170 bp, synthetic construct
  source 1..170: mol_type = other DNA
gggctgggcataaaagtcagggcgctatagttccttactgaaaggtaagttgctatagtaagggcaacagacccgaggcgttggggatcgcctagcccgtgtttacgggctctccccatattcaaaataatgacagacgagcaccttggagcatttatctccgaggtgct

SEQ ID NO: 19129 - DNA, 145 bp, synthetic construct
  source 1..145: mol_type = other DNA
agggctgggcataaaagtcagggcgttgtagctccctttctcatttcggaaacgaaatgagaaccgttgctacaataaggccgtctgaaaagatgtgccgcaacgctctgccccttaaagcttctgctttaaggggcatcgttta

SEQ ID NO: 19130 - DNA, 96 bp, synthetic construct
  source 1..96: mol_type = other DNA
gctgggcataaaagtcaggggttttagagctagaaatagcaagttaaaataaggctagtccgttatcaacttgaaaaagtggcaccgagtcggtgc

SEQ ID NO: 19131 - DNA, 96 bp, synthetic construct
  source 1..96: mol_type = other DNA
tctccttaaacctgtcttgtgttttagagctagaaatagcaagttaaaataaggctagtccgttatcaacttgaaaaagtggcaccgagtcggtgc

SEQ ID NO: 19132 - DNA, 170 bp, synthetic construct; identical to SEQ ID NO: 19128
  source 1..170: mol_type = other DNA

SEQ ID NO: 19133 - DNA, 96 bp, synthetic construct
  source 1..96: mol_type = other DNA
ctgggcataaaagtcagggcgttttagagctagaaatagcaagttaaaataaggctagtccgttatcaacttgaaaaagtggcaccgagtcggtgc

SEQ ID NO: 19134 - DNA, 96 bp, synthetic construct
  source 1..96: mol_type = other DNA
ctccttaaacctgtcttgtagttttagagctagaaatagcaagttaaaataaggctagtccgttatcaacttgaaaaagtggcaccgagtcggtgc

SEQ ID NO: 19135 - DNA, 170 bp, synthetic construct
  source 1..170: mol_type = other DNA
ttggtctccttaaacctgtcttggctatagttccttactgaaaggtaagttgctatagtaagggcaacagacccgaggcgttggggatcgcctagcccgtgtttacgggctctccccatattcaaaataatgacagacgagcaccttggagcatttatctccgaggtgct

SEQ ID NO: 19136 - DNA, 170 bp, synthetic construct; identical to SEQ ID NO: 19135
  source 1..170: mol_type = other DNA

SEQ ID NO: 19137 - DNA, 145 bp, synthetic construct
  source 1..145: mol_type = other DNA
tattggtctccttaaacctgtcttgttgtagctccctttctcatttcggaaacgaaatgagaaccgttgctacaataaggccgtctgaaaagatgtgccgcaacgctctgccccttaaagcttctgctttaaggggcatcgttta

SEQ ID NO: 19138 - DNA, 96 bp, synthetic construct
  source 1..96: mol_type = other DNA
tccttaaacctgtcttgtaagttttagagctagaaatagcaagttaaaataaggctagtccgttatcaacttgaaaaagtggcaccgagtcggtgc

SEQ ID NO: 19139 - DNA, 96 bp, synthetic construct
  source 1..96: mol_type = other DNA
tgggcataaaagtcagggcagttttagagctagaaatagcaagttaaaataaggctagtccgttatcaacttgaaaaagtggcaccgagtcggtgc

SEQ ID NO: 19140 - DNA, 170 bp, synthetic construct; identical to SEQ ID NO: 19135
  source 1..170: mol_type = other DNA

SEQ ID NO: 19141 - DNA, 170 bp, synthetic construct
  source 1..170: mol_type = other DNA
ggctgggcataaaagtcagggcagctatagttccttactgaaaggtaagttgctatagtaagggcaacagacccgaggcgttggggatcgcctagcccgtgtttacgggctctccccatattcaaaataatgacagacgagcaccttggagcatttatctccgaggtgct

SEQ ID NO: 19142 - DNA, 170 bp, synthetic construct; identical to SEQ ID NO: 19135
  source 1..170: mol_type = other DNA

SEQ ID NO: 19143 - DNA, 96 bp, synthetic construct
  source 1..96: mol_type = other DNA
ttaaacctgtcttgtaacctgttttagagctagaaatagcaagttaaaataaggctagtccgttatcaacttgaaaaagtggcaccgagtcggtgc

SEQ ID NO: 19144 - DNA, 96 bp, synthetic construct
  source 1..96: mol_type = other DNA
gggcataaaagtcagggcaggttttagagctagaaatagcaagttaaaataaggctagtccgttatcaacttgaaaaagtggcaccgagtcggtgc

SEQ ID NO: 19145 - DNA, 96 bp, synthetic construct
  source 1..96: mol_type = other DNA
ccttaaacctgtcttgtaacgttttagagctagaaatagcaagttaaaataaggctagtccgttatcaacttgaaaaagtggcaccgagtcggtgc

SEQ ID NO: 19146 - DNA, 96 bp, synthetic construct
  source 1..96: mol_type = other DNA
cttaaacctgtcttgtaaccgttttagagctagaaatagcaagttaaaataaggctagtccgttatcaacttgaaaaagtggcaccgagtcggtgc

SEQ ID NO: 19147 - DNA, 96 bp, synthetic construct; identical to SEQ ID NO: 19146
  source 1..96: mol_type = other DNA

SEQ ID NO: 19148 - DNA, 96 bp, synthetic construct; identical to SEQ ID NO: 19144
  source 1..96: mol_type = other DNA

SEQ ID NO: 19149 - DNA, 96 bp, synthetic construct
  source 1..96: mol_type = other DNA
ggcataaaagtcagggcagagttttagagctagaaatagcaagttaaaataaggctagtccgttatcaacttgaaaaagtggcaccgagtcggtgc

SEQ ID NO: 19150 - DNA, 170 bp, synthetic construct
  source 1..170: mol_type = other DNA
ccttaaacctgtcttgtaaccttgctatagttccttactgaaaggtaagttgctatagtaagggcaacagacccgaggcgttggggatcgcctagcccgtgtttacgggctctccccatattcaaaataatgacagacgagcaccttggagcatttatctccgaggtgct

SEQ ID NO: 19151 - DNA, 97 bp, synthetic construct
  source 1..97: mol_type = other DNA
tccttaaacctgtcttgtaacgttttagtactctggaaacagaatctactaaaacaaggcaaaatgccgtgtttatctcgtcaacttgttggcgaga

SEQ ID NO: 19152 - DNA, 96 bp, synthetic construct; identical to SEQ ID NO: 19139
  source 1..96: mol_type = other DNA

SEQ ID NO: 19153 - DNA, 96 bp, synthetic construct
  source 1..96: mol_type = other DNA
gcataaaagtcagggcagaggttttagagctagaaatagcaagttaaaataaggctagtccgttatcaacttgaaaaagtggcaccgagtcggtgc

SEQ ID NO: 19154 - DNA, 96 bp, synthetic construct; identical to SEQ ID NO: 19143
  source 1..96: mol_type = other DNA

SEQ ID NO: 19155 - DNA, 170 bp, synthetic construct
  source 1..170: mol_type = other DNA
tgggcataaaagtcagggcagaggctatagttccttactgaaaggtaagttgctatagtaagggcaacagacccgaggcgttggggatcgcctagcccgtgtttacgggctctccccatattcaaaataatgacagacgagcaccttggagcatttatctccgaggtgct

SEQ ID NO: 19156 - DNA, 97 bp, synthetic construct
  source 1..97: mol_type = other DNA
ggctgggcataaaagtcaggggttttagtactctggaaacagaatctactaaaacaaggcaaaatgccgtgtttatctcgtcaacttgttggcgaga

SEQ ID NO: 19157 - DNA, 97 bp, synthetic construct
  source 1..97: mol_type = other DNA
gctgggcataaaagtcagggcgttttagtactctggaaacagaatctactaaaacaaggcaaaatgccgtgtttatctcgtcaacttgttggcgaga

SEQ ID NO: 19158 - DNA, 96 bp, synthetic construct
  source 1..96: mol_type = other DNA
cataaaagtcagggcagagcgttttagagctagaaatagcaagttaaaataaggctagtccgttatcaacttgaaaaagtggcaccgagtcggtgc

SEQ ID NO: 19159 - DNA, 96 bp, synthetic construct
  source 1..96: mol_type = other DNA
taaacctgtcttgtaaccttgttttagagctagaaatagcaagttaaaataaggctagtccgttatcaacttgaaaaagtggcaccgagtcggtgc

SEQ ID NO: 19160 - DNA, 97 bp, synthetic construct; identical to SEQ ID NO: 19156
  source 1..97: mol_type = other DNA

SEQ ID NO: 19161 - DNA, 96 bp, synthetic construct; identical to SEQ ID NO: 19144
  source 1..96: mol_type = other DNA

SEQ ID NO: 19162 - DNA, 96 bp, synthetic construct
  source 1..96: mol_type = other DNA
ataaaagtcagggcagagccgttttagagctagaaatagcaagttaaaataaggctagtccgttatcaacttgaaaaagtggcaccgagtcggtgc

SEQ ID NO: 19163 - DNA, 96 bp, synthetic construct
  source 1..96: mol_type = other DNA
aaacctgtcttgtaaccttggttttagagctagaaatagcaagttaaaataaggctagtccgttatcaacttgaaaaagtggcaccgagtcggtgc

SEQ ID NO: 19164 - DNA, 96 bp, synthetic construct
  source 1..96: mol_type = other DNA
agtcagggcagagccatctagttttagagctagaaatagcaagttaaaataaggctagtccgttatcaacttgaaaaagtggcaccgagtcggtgc

SEQ ID NO: 19165 - DNA, 96 bp, synthetic construct; identical to SEQ ID NO: 19121
  source 1..96: mol_type = other DNA

SEQ ID NO: 19166 - DNA, 96 bp, synthetic construct
  source 1..96: mol_type = other DNA
taaaagtcagggcagagccagttttagagctagaaatagcaagttaaaataaggctagtccgttatcaacttgaaaaagtggcaccgagtcggtgc

SEQ ID NO: 19167 - DNA, 96 bp, synthetic construct
  source 1..96: mol_type = other DNA
gtcagggcagagccatctatgttttagagctagaaatagcaagttaaaataaggctagtccgttatcaacttgaaaaagtggcaccgagtcggtgc

SEQ ID NO: 19168 - DNA, 96 bp, synthetic construct
  source 1..96: mol_type = other DNA
aacctgtcttgtaaccttgagttttagagctagaaatagcaagttaaaataaggctagtccgttatcaacttgaaaaagtggcaccgagtcggtgc

SEQ ID NO: 19169 - DNA, 170 bp, synthetic construct
  source 1..170: mol_type = other DNA
cttaaacctgtcttgtaaccttggctatagttccttactgaaaggtaagttgctatagtaagggcaacagacccgaggcgttggggatcgcctagcccgtgtttacgggctctccccatattcaaaataatgacagacgagcaccttggagcatttatctccgaggtgct

SEQ ID NO: 19170 - DNA, 170 bp, synthetic construct; identical to SEQ ID NO: 19169
  source 1..170: mol_type = other DNA

SEQ ID NO: 19171 - DNA, 97 bp, synthetic construct
  source 1..97: mol_type = other DNA
ccagggctgggcataaaagtcgttttagtactctggaaacagaatctactaaaacaaggcaaaatgccgtgtttatctcgtcaacttgttggcgaga

SEQ ID NO: 19172 - DNA, 97 bp, synthetic construct; identical to SEQ ID NO: 19157
  source 1..97: mol_type = other DNA

SEQ ID NO: 19173 - DNA, 96 bp, synthetic construct; identical to SEQ ID NO: 19164
  source 1..96: mol_type = other DNA

SEQ ID NO: 19174 - DNA, 96 bp, synthetic construct
  source 1..96: mol_type = other DNA
aaaagtcagggcagagccatgttttagagctagaaatagcaagttaaaataaggctagtccgttatcaacttgaaaaagtggcaccgagtcggtgc

SEQ ID NO: 19175 - DNA, 96 bp, synthetic construct; identical to SEQ ID NO: 19143
  source 1..96: mol_type = other DNA

SEQ ID NO: 19176 - DNA, 96 bp, synthetic construct
  source 1..96: mol_type = other DNA
acctgtcttgtaaccttgatgttttagagctagaaatagcaagttaaaataaggctagtccgttatcaacttgaaaaagtggcaccgagtcggtgc

SEQ ID NO: 19177 - DNA, 170 bp, synthetic construct
  source 1..170: mol_type = other DNA
taaaagtcagggcagagccatctgctatagttccttactgaaaggtaagttgctatagtaagggcaacagacccgaggcgttggggatcgcctagcccgtgtttacgggctctccccatattcaaaataatgacagacgagcaccttggagcatttatctccgaggtgct

SEQ ID NO: 19178 - DNA, 170 bp, synthetic construct; identical to SEQ ID NO: 19177
  source 1..170: mol_type = other DNA

SEQ ID NO: 19179 - DNA, 97 bp, synthetic construct; identical to SEQ ID NO: 19156
  source 1..97: mol_type = other DNA

SEQ ID NO: 19180 - DNA, 96 bp, synthetic construct
  source 1..96: mol_type = other DNA
cttgtaaccttgataccaacgttttagagctagaaatagcaagttaaaataaggctagtccgttatcaacttgaaaaagtggcaccgagtcggtgc

SEQ ID NO: 19181 - DNA, 96 bp, synthetic construct
  source 1..96: mol_type = other DNA
cctgtcttgtaaccttgatagttttagagctagaaatagcaagttaaaataaggctagtccgttatcaacttgaaaaagtggcaccgagtcggtgc

SEQ ID NO: 19182 - DNA, 96 bp, synthetic construct
  source 1..96: mol_type = other DNA
aaagtcagggcagagccatcgttttagagctagaaatagcaagttaaaataaggctagtccgttatcaacttgaaaaagtggcaccgagtcggtgc

SEQ ID NO: 19183 - DNA, 96 bp, synthetic construct
  source 1..96: mol_type = other DNA
ttgtaaccttgataccaaccgttttagagctagaaatagcaagttaaaataaggctagtccgttatcaacttgaaaaagtggcaccgagtcggtgc

SEQ ID NO: 19184 - DNA, 96 bp, synthetic construct
  source 1..96: mol_type = other DNA
aagtcagggcagagccatctgttttagagctagaaatagcaagttaaaataaggctagtccgttatcaacttgaaaaagtggcaccgagtcggtgc

SEQ ID NO: 19185 - DNA, 96 bp, synthetic construct
  source 1..96: mol_type = other DNA
ctgtcttgtaaccttgatacgttttagagctagaaatagcaagttaaaataaggctagtccgttatcaacttgaaaaagtggcaccgagtcggtgc

SEQ ID NO: 19186 - DNA, 170 bp, synthetic construct
  source 1..170: mol_type = other DNA
aacctgtcttgtaaccttgatacgctatagttccttactgaaaggtaagttgctatagtaagggcaacagacccgaggcgttggggatcgcctagcccgtgtttacgggctctccccatattcaaaataatgacagacgagcaccttggagcatttatctccgaggtgct

SEQ ID NO: 19187 - DNA, 96 bp, synthetic construct; identical to SEQ ID NO: 19180
  source 1..96: mol_type = other DNA

SEQ ID NO: 19188 - DNA, 96 bp, synthetic construct
  source 1..96: mol_type = other DNA
accttgataccaacctgcccgttttagagctagaaatagcaagttaaaataaggctagtccgttatcaacttgaaaaagtggcaccgagtcggtgc

SEQ ID NO: 19189 - DNA, 96 bp, synthetic construct
  source 1..96: mol_type = other DNA
tgtcttgtaaccttgataccgttttagagctagaaatagcaagttaaaataaggctagtccgttatcaacttgaaaaagtggcaccgagtcggtgc

SEQ ID NO: 19190 - DNA, 96 bp, synthetic construct; identical to SEQ ID NO: 19183
  source 1..96: mol_type = other DNA

SEQ ID NO: 19191 - DNA, 96 bp, synthetic construct; identical to SEQ ID NO: 19164
  source 1..96: mol_type = other DNA

SEQ ID NO: 19192 - DNA, 170 bp, synthetic construct; identical to SEQ ID NO: 19177
  source 1..170: mol_type = other DNA

SEQ ID NO: 19193 - DNA, 97 bp, synthetic construct; identical to SEQ ID NO: 19156
  source 1..97: mol_type = other DNA

SEQ ID NO: 19194 - DNA, 97 bp, synthetic construct
  source 1..97: mol_type = other DNA
taaccttgataccaacctgccgttttagtactctggaaacagaatctactaaaacaaggcaaaatgccgtgtttatctcgtcaacttgttggcgaga

SEQ ID NO: 19195 - DNA, 97 bp, synthetic construct
  source 1..97: mol_type = other DNA
gtaaccttgataccaacctgcgttttagtactctggaaacagaatctactaaaacaaggcaaaatgccgtgtttatctcgtcaacttgttggcgaga

SEQ ID NO: 19196 - DNA, 96 bp, synthetic construct; identical to SEQ ID NO: 19180
  source 1..96: mol_type = other DNA

SEQ ID NO: 19197 - DNA, 96 bp, synthetic construct
  source 1..96: mol_type = other DNA
gtcttgtaaccttgataccagttttagagctagaaatagcaagttaaaataaggctagtccgttatcaacttgaaaaagtggcaccgagtcggtgc

SEQ ID NO: 19198 - DNA, 96 bp, synthetic construct; identical to SEQ ID NO: 19167
  source 1..96: mol_type = other DNA

SEQ ID NO: 19199 - DNA, 96 bp, synthetic construct; identical to SEQ ID NO: 19167
  source 1..96: mol_type = other DNA

SEQ ID NO: 19200 - DNA, 97 bp, synthetic construct
  source 1..97: mol_type = other DNA
tgtaaccttgataccaacctggttttagtactctggaaacagaatctactaaaacaaggcaaaatgccgtgtttatctcgtcaacttgttggcgaga

SEQ ID NO: 19201 - DNA, 97 bp, synthetic construct; identical to SEQ ID NO: 19200
  source 1..97: mol_type = other DNA

SEQ ID NO: 19202 - DNA, 96 bp, synthetic construct; identical to SEQ ID NO: 19164
  source 1..96: mol_type = other DNA

SEQ ID NO: 19203 - DNA, 96 bp, synthetic construct
  source 1..96: mol_type = other DNA
tcagggcagagccatctattgttttagagctagaaatagcaagttaaaataaggctagtccgttatcaacttgaaaaagtggcaccgagtcggtgc

SEQ ID NO: 19204 - DNA, 96 bp, synthetic construct
  source 1..96: mol_type = other DNA
tcttgtaaccttgataccaagttttagagctagaaatagcaagttaaaataaggctagtccgttatcaacttgaaaaagtggcaccgagtcggtgc

SEQ ID NO: 19205 - DNA, 97 bp, synthetic construct; identical to SEQ ID NO: 19157
  source 1..97: mol_type = other DNA

SEQ ID NO: 19206 - DNA, 96 bp, synthetic construct
  source 1..96: mol_type = other DNA
cagggcagagccatctattggttttagagctagaaatagcaagttaaaataaggctagtccgttatcaacttgaaaaagtggcaccgagtcggtgc

SEQ ID NO: 19207 - DNA, 96 bp, synthetic construct; identical to SEQ ID NO: 19180
  source 1..96: mol_type = other DNA

SEQ ID NO: 19208 - DNA, 97 bp, synthetic construct
  source 1..97: mol_type = other DNA
catctattgcttacatttgctgttttagtactctggaaacagaatctactaaaacaaggcaaaatgccgtgtttatctcgtcaacttgttggcgaga

SEQ ID NO: 19209 - DNA, 97 bp, synthetic construct; identical to SEQ ID NO: 19208
  source 1..97: mol_type = other DNA

SEQ ID NO: 19210 - DNA, 96 bp, synthetic construct; identical to SEQ ID NO: 19167
  source 1..96: mol_type = other DNA

SEQ ID NO: 19211 - DNA, 96 bp, synthetic construct
  source 1..96: mol_type = other DNA
agggcagagccatctattgcgttttagagctagaaatagcaagttaaaataaggctagtccgttatcaacttgaaaaagtggcaccgagtcggtgc

SEQ ID NO: 19212 - DNA, 96 bp, synthetic construct; identical to SEQ ID NO: 19183
  source 1..96: mol_type = other DNA

SEQ ID NO: 19213 - DNA, 96 bp, synthetic construct
  source 1..96: mol_type = other DNA
gagccatctattgcttacatgttttagagctagaaatagcaagttaaaataaggctagtccgttatcaacttgaaaaagtggcaccgagtcggtgc

SEQ ID NO: 19214 - DNA, 96 bp, synthetic construct; identical to SEQ ID NO: 19121
  source 1..96: mol_type = other DNA

SEQ ID NO: 19215 - DNA, 96 bp, synthetic construct
  source 1..96: mol_type = other DNA
gggcagagccatctattgctgttttagagctagaaatagcaagttaaaataaggctagtccgttatcaacttgaaaaagtggcaccgagtcggtgc

SEQ ID NO: 19216 - DNA, 96 bp, synthetic construct; identical to SEQ ID NO: 19167
  source 1..96: mol_type = other DNA

SEQ ID NO: 19217 - DNA, 96 bp, synthetic construct
  source 1..96: mol_type = other DNA
tgtaaccttgataccaacctgttttagagctagaaatagcaagttaaaataaggctagtccgttatcaacttgaaaaagtggcaccgagtcggtgc

SEQ ID NO: 19218 - DNA, 97 bp, synthetic construct; identical to SEQ ID NO: 19171
  source 1..97: mol_type = other DNA

SEQ ID NO: 19219 - DNA, 97 bp, synthetic construct; identical to SEQ ID NO: 19157
  source 1..97: mol_type = other DNA

SEQ ID NO: 19220 - DNA, 96 bp, synthetic construct; identical to SEQ ID NO: 19213
  source 1..96: mol_type = other DNA

SEQ ID NO: 19221 - DNA, 96 bp, synthetic construct; identical to SEQ ID NO: 19121
  source 1..96: mol_type = other DNA

SEQ ID NO: 19222 - DNA, 96 bp, synthetic construct
  source 1..96: mol_type = other DNA
ggcagagccatctattgcttgttttagagctagaaatagcaagttaaaataaggctagtccgttatcaacttgaaaaagtggcaccgagtcggtgc

SEQ ID NO: 19223 - DNA, 96 bp, synthetic construct; identical to SEQ ID NO: 19167
  source 1..96: mol_type = other DNA

SEQ ID NO: 19224 - DNA, 96 bp, synthetic construct
  source 1..96: mol_type = other DNA
gtaaccttgataccaacctggttttagagctagaaatagcaagttaaaataaggctagtccgttatcaacttgaaaaagtggcaccgagtcggtgc

SEQ ID NO: 19225 - DNA, 170 bp, synthetic construct
  source 1..170: mol_type = other DNA
agtcagggcagagccatctattggctatagttccttactgaaaggtaagttgctatagtaagggcaacagacccgaggcgttggggatcgcctagcccgtgtttacgggctctccccatattcaaaataatgacagacgagcaccttggagcatttatctccgaggtgct

SEQ ID NO: 19226 - DNA, 170 bp, synthetic construct
  source 1..170: mol_type = other DNA
gtcttgtaaccttgataccaaccgctatagttccttactgaaaggtaagttgctatagtaagggcaacagacccgaggcgttggggatcgcctagcccgtgtttacgggctctccccatattcaaaataatgacagacgagcaccttggagcatttatctccgaggtgct

SEQ ID NO: 19227 - DNA, 170 bp, synthetic construct; identical to SEQ ID NO: 19225
  source 1..170: mol_type = other DNA

SEQ ID NO: 19228 - DNA, 170 bp, synthetic construct; identical to SEQ ID NO: 19226
  source 1..170: mol_type = other DNA

SEQ ID NO: 19229 - DNA, 145 bp, synthetic construct
  source 1..145: mol_type = other DNA
tgtaaccttgataccaacctgcccgttgtagctccctttctcatttcggaaacgaaatgagaaccgttgctacaataaggccgtctgaaaagatgtgccgcaacgctctgccccttaaagcttctgctttaaggggcatcgttta

SEQ ID NO: 19230 - DNA, 99 bp, synthetic construct
  source 1..99: mol_type = other DNA
agggctgggcataaaagtcaggggttttagtactctggaaacagaatctactaaaacaaggcaaaatgccgtgtttatctcgtcaacttgttggcgaga

SEQ ID NO: 19231 - DNA, 97 bp, synthetic construct; identical to SEQ ID NO: 19208
  source 1..97: mol_type = other DNA

SEQ ID NO: 19232 - DNA, 97 bp, synthetic construct; identical to SEQ ID NO: 19171
  source 1..97: mol_type = other DNA

SEQ ID NO: 19233 - DNA, 97 bp, synthetic construct; identical to SEQ ID NO: 19157
  source 1..97: mol_type = other DNA

SEQ ID NO: 19234 - DNA, 96 bp, synthetic construct; identical to SEQ ID NO: 19213
  source 1..96: mol_type = other DNA

SEQ ID NO: 19235 - DNA, 96 bp, synthetic construct
  source 1..96: mol_type = other DNA
gcagagccatctattgcttagttttagagctagaaatagcaagttaaaataaggctagtccgttatcaacttgaaaaagtggcaccgagtcggtgc

SEQ ID NO: 19236 - DNA, 96 bp, synthetic construct
  source 1..96: mol_type = other DNA
taaccttgataccaacctgcgttttagagctagaaatagcaagttaaaataaggctagtccgttatcaacttgaaaaagtggcaccgagtcggtgc

SEQ ID NO: 19237 - DNA, 170 bp, synthetic construct
  source 1..170: mol_type = other DNA
gtaaccttgataccaacctgcccgctatagttccttactgaaaggtaagttgctatagtaagggcaacagacccgaggcgttggggatcgcctagcccgtgtttacgggctctccccatattcaaaataatgacagacgagcaccttggagcatttatctccgaggtgct

SEQ ID NO: 19238 - DNA, 170 bp, synthetic construct; identical to SEQ ID NO: 19237
  source 1..170: mol_type = other DNA

SEQ ID NO: 19239 - DNA, 97 bp, synthetic construct; identical to SEQ ID NO: 19208
  source 1..97: mol_type = other DNA

SEQ ID NO: 19240 - DNA, 97 bp, synthetic construct; identical to SEQ ID NO: 19157
  source 1..97: mol_type = other DNA

SEQ ID NO: 19241 - DNA, 96 bp, synthetic construct; identical to SEQ ID NO: 19188
  source 1..96: mol_type = other DNA

SEQ ID NO: 19242 - DNA, 96 bp, synthetic construct
  source 1..96: mol_type = other DNA
aaccttgataccaacctgccgttttagagctagaaatagcaagttaaaataaggctagtccgttatcaacttgaaaaagtggcaccgagtcggtgc

SEQ ID NO: 19243 - DNA, 96 bp, synthetic construct
  source 1..96: mol_type = other DNA
cagagccatctattgcttacgttttagagctagaaatagcaagttaaaataaggctagtccgttatcaacttgaaaaagtggcaccgagtcggtgc

SEQ ID NO: 19244 - DNA, 97 bp, synthetic construct; identical to SEQ ID NO: 19208
  source 1..97: mol_type = other DNA

SEQ ID NO: 19245 - DNA, 96 bp, synthetic construct; identical to SEQ ID NO: 19188
  source 1..96: mol_type = other DNA

SEQ ID NO: 19246 - DNA, 96 bp, synthetic construct; identical to SEQ ID NO: 19188
  source 1..96: mol_type = other DNA

SEQ ID NO: 19247 - DNA, 96 bp, synthetic construct
  source 1..96: mol_type = other DNA
agagccatctattgcttacagttttagagctagaaatagcaagttaaaataaggctagtccgttatcaacttgaaaaagtggcaccgagtcggtgc

SEQ ID NO: 19248 - DNA, 170 bp, synthetic construct; identical to SEQ ID NO: 19237
  source 1..170: mol_type = other DNA

SEQ ID NO: 19249 - DNA, 20 bp, synthetic construct
  source 1..20: mol_type = other DNA
catggtgcacctgactcctg

SEQ ID NO: 19250 - DNA, 20 bp, synthetic construct
  source 1..20: mol_type = other DNA
catggtgcatctgactcctg

SEQ ID NO: 19251 - DNA, 20 bp, synthetic construct
  source 1..20: mol_type = other DNA
catggtgcacctgactcctg

SEQ ID NO: 19252 - DNA, 20 bp, synthetic construct
  source 1..20: mol_type = other DNA
catggtgcacctgactcctg

SEQ ID NO: 19253 - DNA, 20 bp, synthetic construct
  source 1..20: mol_type = other DNA
catggtgcacctgactcctg

SEQ ID NO: 19254 - DNA, 20 bp, synthetic construct
  source 1..20: mol_type = other DNA
catggtgcacctgactcctg

SEQ ID NO: 19255 - DNA, 20 bp, synthetic construct
  source 1..20: mol_type = other DNA
catggtgcacctgactcctg

SEQ ID NO: 19256 - DNA, 20 bp, synthetic construct
  source 1..20: mol_type = other DNA
catggtgcacctgactcctg

SEQ ID NO: 19257 - DNA, 20 bp, synthetic construct
  source 1..20: mol_type = other DNA
catggtgcacctgactcctg

SEQ ID NO: 19258 - DNA, 20 bp, synthetic construct
  source 1..20: mol_type = other DNA
catggtgcacctgactcctg

SEQ ID NO: 19259 - DNA, 20 bp, synthetic construct
  source 1..20: mol_type = other DNA
catggtgcacctgactcctg

SEQ ID NO: 19260 - DNA, 20 bp, synthetic construct
  source 1..20: mol_type = other DNA
catggtgcacctgactcctg

SEQ ID NO: 19261 - DNA, 20 bp, synthetic construct
  source 1..20: mol_type = other DNA
catggtgcacctgactcctg

SEQ ID NO: 19262 - DNA, 20 bp, synthetic construct
  source 1..20: mol_type = other DNA
catggtgcacctgactcctg

SEQ ID NO: 19263 - DNA, 20 bp, synthetic construct
  source 1..20: mol_type = other DNA
catggtgcacctgactcctg

SEQ ID NO: 19264 - DNA, 20 bp, synthetic construct
  source 1..20: mol_type = other DNA
catggtgcacctgactcctg

SEQ ID NO: 19265 - DNA, 20 bp, synthetic construct
  source 1..20: mol_type = other DNA
catggtgcacctgactcctg

SEQ ID NO: 19266 - DNA, 20 bp, synthetic construct
  source 1..20: mol_type = other DNA
catggtgcacctgactcctg

SEQ ID NO: 19267 - DNA, 20 bp, synthetic construct
  source 1..20: mol_type = other DNA
catggtgcacctgactcctg

SEQ ID NO: 19268 - DNA, 20 bp, synthetic construct
  source 1..20: mol_type = other DNA
catggtgcacctgactcctg

SEQ ID NO: 19269 - DNA, 20 bp, synthetic construct
  source 1..20: mol_type = other DNA
catggtgcacctgactcctg

SEQ ID NO: 19270 - DNA, 20 bp, synthetic construct
  source 1..20: mol_type = other DNA
catggtgcacctgactcctg

SEQ ID NO: 19271 - DNA, 20 bp, synthetic construct
  source 1..20: mol_type = other DNA
catggtgcacctgactcctg

SEQ ID NO: 19272 - DNA, 20 bp, synthetic construct
  source 1..20: mol_type = other DNA
catggtgcacctgactcctg

SEQ ID NO: 19273 - DNA, 20 bp, synthetic construct
  source 1..20: mol_type = other DNA
catggtgcacctgactcctg

SEQ ID NO: 19274 - DNA, 20 bp, synthetic construct
  source 1..20: mol_type = other DNA
catggtgcacctgactcctg

SEQ ID NO: 19275 - DNA, 20 bp, synthetic construct
  source 1..20: mol_type = other DNA
catggtgcacctgactcctg

SEQ ID NO: 19276 - DNA, 20 bp, synthetic construct
  source 1..20: mol_type = other DNA
catggtgcacctgactcctg

SEQ ID NO: 19277 - DNA, 20 bp, synthetic construct
  source 1..20: mol_type = other DNA
catggtgcacctgactcctg

SEQ ID NO: 19278 - DNA, 20 bp, synthetic construct
  source 1..20: mol_type = other DNA
catggtgcacctgactcctg

SEQ ID NO: 19279 - DNA, 20 bp, synthetic construct
  source 1..20: mol_type = other DNA
catggtgcacctgactcctg

SEQ ID NO: 19280 - DNA, 20 bp, synthetic construct
  source 1..20: mol_type = other DNA
catggtgcacctgactcctg

SEQ ID NO: 19281 - DNA, 20 bp, synthetic construct
  source 1..20: mol_type = other DNA
catggtgcacctgactcctg

SEQ ID NO: 19282 - DNA, 20 bp, synthetic construct
  source 1..20: mol_type = other DNA
catggtgcacctgactcctg

SEQ ID NO: 19283 - DNA, 20 bp, synthetic construct
  source 1..20: mol_type = other DNA
catggtgcacctgactcctg

SEQ ID NO: 19284 - DNA, 20 bp, synthetic construct
  source 1..20: mol_type = other DNA
catggtgcacctgactcctg

SEQ ID NO: 19285 - DNA, 20 bp, synthetic construct
  source 1..20: mol_type = other DNA
catggtgcacctgactcctg

SEQ ID NO: 19286 - DNA, 20 bp, synthetic construct
  source 1..20: mol_type = other DNA
catggtgcacctgactcctg

SEQ ID NO: 19287 - DNA, 20 bp, synthetic construct
  source 1..20: mol_type = other DNA
catggtgcacctgactcctg

SEQ ID NO: 19288 - DNA, 20 bp, synthetic construct
  source 1..20: mol_type = other DNA
catggtgcacctgactcctg

SEQ ID NO: 19289 - DNA, 20 bp, synthetic construct
  source 1..20: mol_type = other DNA
catggtgcacctgactcctg

SEQ ID NO: 19290 - DNA, 20 bp, synthetic construct
  source 1..20: mol_type = other DNA
catggtgcacctgactcctg

SEQ ID NO: 19291 - DNA, 20 bp, synthetic construct
  source 1..20: mol_type = other DNA
catggtgcacctgactcctg

SEQ ID NO: 19292 - DNA, 20 bp, synthetic construct
  source 1..20: mol_type = other DNA
catggtgcacctgactcctg

SEQ ID NO: 19293 - DNA, 20 bp, synthetic construct
  source 1..20: mol_type = other DNA
catggtgcacctgactcctg

SEQ ID NO: 19294 - DNA, 20 bp, synthetic construct
  source 1..20: mol_type = other DNA
catggtgcacctgactcctg

SEQ ID NO: 19295 - DNA, 20 bp, synthetic construct
  source 1..20: mol_type = other DNA
catggtgcacctgactcctg

SEQ ID NO: 19296 - DNA, 20 bp, synthetic construct
  source 1..20: mol_type = other DNA
catggtgcacctgactcctg

SEQ ID NO: 19297 - DNA, 20 bp, synthetic construct
  source 1..20: mol_type = other DNA
catggtgcacctgactcctg

SEQ ID NO: 19298 - DNA, 20 bp, synthetic construct
  source 1..20: mol_type = other DNA
catggtgcacctgactcctg

SEQ ID NO: 19299 - DNA, 20 bp, synthetic construct
  source 1..20: mol_type = other DNA
catggtgcacctgactcctg

SEQ ID NO: 19300 - DNA, 20 bp, synthetic construct
  source 1..20: mol_type = other DNA
catggtgcacctgactcctg

SEQ ID NO: 19301 - DNA, 20 bp, synthetic construct
  source 1..20: mol_type = other DNA
catggtgcacctgactcctg

SEQ ID NO: 19302 - DNA, 20 bp, synthetic construct
  source 1..20: mol_type = other DNA
catggtgcacctgactcctg

SEQ ID NO: 19303 - DNA, 20 bp, synthetic construct
  source 1..20: mol_type = other DNA
catggtgcacctgactcctg

SEQ ID NO: 19304 - DNA, 20 bp, synthetic construct
  source 1..20: mol_type = other DNA
catggtgcacctgactcctg

SEQ ID NO: 19305 - DNA, 20 bp, synthetic construct
  source 1..20: mol_type = other DNA
catggtgcacctgactcctg

SEQ ID NO: 19306 - DNA, 20 bp, synthetic construct
  source 1..20: mol_type = other DNA
catggtgcacctgactcctg

SEQ ID NO: 19307 - DNA, 20 bp, synthetic construct
  source 1..20: mol_type = other DNA
catggtgcacctgactcctg

SEQ ID NO: 19308 - DNA, 20 bp, synthetic construct
  source 1..20: mol_type = other DNA
catggtgcacctgactcctg

SEQ ID NO: 19309 - DNA, 20 bp, synthetic construct
  source 1..20: mol_type = other DNA
catggtgcacctgactcctg

SEQ ID NO: 19310 - DNA, 20 bp, synthetic construct
  source 1..20: mol_type = other DNA
catggtgcacctgactcctg

SEQ ID NO: 19311 - DNA, 20 bp, synthetic construct
  source 1..20: mol_type = other DNA
catggtgcacctgactcctg

SEQ ID NO: 19312 - DNA, 20 bp, synthetic construct
  source 1..20: mol_type = other DNA
catggtgcacctgactcctg

SEQ ID NO: 19313 - DNA, 20 bp, synthetic construct
  source 1..20: mol_type = other DNA
catggtgcacctgactcctg

SEQ ID NO: 19314 - DNA, 20 bp, synthetic construct
  source 1..20: mol_type = other DNA
catggtgcacctgactcctg

SEQ ID NO: 19315 - DNA, 20 bp, synthetic construct
  source 1..20: mol_type = other DNA
catggtgcacctgactcctg

SEQ ID NO: 19316 - DNA, 20 bp, synthetic construct
  source 1..20: mol_type = other DNA
catggtgcacctgactcctg

SEQ ID NO: 19317 - DNA, 20 bp, synthetic construct
  source 1..20: mol_type = other DNA
catggtgcacctgactcctg

SEQ ID NO: 19318 - DNA, 20 bp, synthetic construct
  source 1..20: mol_type = other DNA
catggtgcacctgactcctg

SEQ ID NO: 19319 - DNA, 20 bp, synthetic construct
  source 1..20: mol_type = other DNA
catggtgcacctgactcctg

SEQ ID NO: 19320 - DNA, 20 bp, synthetic construct
  source 1..20: mol_type = other DNA
catggtgcacctgactcctg

SEQ ID NO: 19321 - DNA, 20 bp, synthetic construct
  source 1..20: mol_type = other DNA
catggtgcacctgactcctg

SEQ ID NO: 19322 - DNA, 20 bp, synthetic construct
  source 1..20: mol_type = other DNA
catggtgcacctgactcctg

SEQ ID NO: 19323 - DNA, 20 bp, synthetic construct
  source 1..20: mol_type = other DNA
catggtgcacctgactcctg

SEQ ID NO: 19324 - DNA, 20 bp, synthetic construct
  source 1..20: mol_type = other DNA
catggtgcacctgactcctg

SEQ ID NO: 19325 - DNA, 20 bp, synthetic construct
  source 1..20: mol_type = other DNA
catggtgcacctgactcctg

SEQ ID NO: 19326 - DNA, 20 bp, synthetic construct
  source 1..20: mol_type = other DNA
catggtgcacctgactcctg

SEQ ID NO: 19327 - DNA, 20 bp, synthetic construct
  source 1..20: mol_type = other DNA
catggtgcacctgactcctg

SEQ ID NO: 19328 - DNA, 20 bp, synthetic construct
  source 1..20: mol_type = other DNA
catggtgcacctgactcctg

SEQ ID NO: 19329 - DNA, 20 bp, synthetic construct
  source 1..20: mol_type = other DNA
catggtgcacctgactcctg

SEQ ID NO: 19330 - DNA, 20 bp, synthetic construct
  source 1..20: mol_type = other DNA
catggtgcacctgactcctg

SEQ ID NO: 19331 - DNA, 20 bp, synthetic construct
  source 1..20: mol_type = other DNA
catggtgcacctgactcctg

SEQ ID NO: 19332 - DNA, 20 bp, synthetic construct
  source 1..20: mol_type = other DNA
catggtgcacctgactcctg

SEQ ID NO: 19333 - DNA, 20 bp, synthetic construct
  source 1..20: mol_type = other DNA
catggtgcacctgactcctg

SEQ ID NO: 19334 - DNA, 20 bp, synthetic construct
  source 1..20: mol_type = other DNA
catggtgcacctgactcctg

SEQ ID NO: 19335 - DNA, 20 bp, synthetic construct
  source 1..20: mol_type = other DNA
catggtgcacctgactcctg

SEQ ID NO: 19336 - DNA, 20 bp, synthetic construct
  source 1..20: mol_type = other DNA
catggtgcacctgactcctg

SEQ ID NO: 19337 - DNA, 20 bp, synthetic construct
  source 1..20: mol_type = other DNA
catggtgcacctgactcctg

SEQ ID NO: 19338 - DNA, 20 bp, synthetic construct
  source 1..20: mol_type = other DNA
catggtgcacctgactcctg

SEQ ID NO: 19339 - DNA, 20 bp, synthetic construct
  source 1..20: mol_type = other DNA
catggtgcacctgactcctg

SEQ ID NO: 19340 - DNA, 20 bp, synthetic construct
  source 1..20: mol_type = other DNA
catggtgcacctgactcctg

SEQ ID NO: 19341 - DNA, 76 bp, synthetic construct; identical to SEQ ID NO: 11012
  source 1..76: mol_type = other DNA

SEQ ID NO: 19342 - DNA, 76 bp, synthetic construct; identical to SEQ ID NO: 11012
  source 1..76: mol_type = other DNA

SEQ ID NO: 19343 - DNA, 76 bp, synthetic construct; identical to SEQ ID NO: 11012
  source 1..76: mol_type = other DNA

SEQ ID NO: 19344 - DNA, 76 bp, synthetic construct; identical to SEQ ID NO: 11012
  source 1..76: mol_type = other DNA

SEQ ID NO: 19345 - DNA, 76 bp, synthetic construct; identical to SEQ ID NO: 11012
  source 1..76: mol_type = other DNA

SEQ ID NO: 19346 - DNA, 76 bp, synthetic construct; identical to SEQ ID NO: 11012
  source 1..76: mol_type = other DNA

SEQ ID NO: 19347 - DNA, 76 bp, synthetic construct; identical to SEQ ID NO: 11012
  source 1..76: mol_type = other DNA

SEQ ID NO: 19348 - DNA, 76 bp, synthetic construct; identical to SEQ ID NO: 11012
  source 1..76: mol_type = other DNA

SEQ ID NO: 19349 - DNA, 76 bp, synthetic construct; identical to SEQ ID NO: 11012
  source 1..76: mol_type = other DNA

SEQ ID NO: 19350 - DNA, 76 bp, synthetic construct; identical to SEQ ID NO: 11012
  source 1..76: mol_type = other DNA

SEQ ID NO: 19351 - DNA, 76 bp, synthetic construct; identical to SEQ ID NO: 11012
  source 1..76: mol_type = other DNA

SEQ ID NO: 19352 - DNA, 76 bp, synthetic construct; identical to SEQ ID NO: 11012
  source 1..76: mol_type = other DNA

SEQ ID NO: 19353 - DNA, 76 bp, synthetic construct; identical to SEQ ID NO: 11012
  source 1..76: mol_type = other DNA

SEQ ID NO: 19354 - DNA, 76 bp, synthetic construct; identical to SEQ ID NO: 11012
  source 1..76: mol_type = other DNA

SEQ ID NO: 19355 - DNA, 76 bp, synthetic construct; identical to SEQ ID NO: 11012
  source 1..76: mol_type = other DNA

SEQ ID NO: 19356 - DNA, 76 bp, synthetic construct; identical to SEQ ID NO: 11012
  source 1..76: mol_type = other DNA

SEQ ID NO: 19357 - DNA, 76 bp, synthetic construct; identical to SEQ ID NO: 11012
  source 1..76: mol_type = other DNA

SEQ ID NO: 19358 - DNA, 76 bp, synthetic construct; identical to SEQ ID NO: 11012
  source 1..76: mol_type = other DNA

SEQ ID NO: 19359 - DNA, 76 bp, synthetic construct; identical to SEQ ID NO: 11012
  source 1..76: mol_type = other DNA

SEQ ID NO: 19360 - DNA, 76 bp, synthetic construct; identical to SEQ ID NO: 11012
  source 1..76: mol_type = other DNA

SEQ ID NO: 19361 - DNA, 76 bp, synthetic construct; identical to SEQ ID NO: 11012
  source 1..76: mol_type = other DNA

SEQ ID NO: 19362 - DNA, 76 bp, synthetic construct; identical to SEQ ID NO: 11012
  source 1..76: mol_type = other DNA

SEQ ID NO: 19363 - DNA, 76 bp, synthetic construct; identical to SEQ ID NO: 11012
  source 1..76: mol_type = other DNA

SEQ ID NO: 19364 - DNA, 76 bp, synthetic construct; identical to SEQ ID NO: 11012
  source 1..76: mol_type = other DNA

SEQ ID NO: 19365 - DNA, 76 bp, synthetic construct; identical to SEQ ID NO: 11012
  source 1..76: mol_type = other DNA

SEQ ID NO: 19366 - DNA, 76 bp, synthetic construct; identical to SEQ ID NO: 11012
  source 1..76: mol_type = other DNA

SEQ ID NO: 19367 - DNA, 76 bp, synthetic construct; identical to SEQ ID NO: 11012
  source 1..76: mol_type = other DNA

SEQ ID NO: 19368 - DNA, 76 bp, synthetic construct; identical to SEQ ID NO: 11012
  source 1..76: mol_type = other DNA

SEQ ID NO: 19369 - DNA, 76 bp, synthetic construct; identical to SEQ ID NO: 11012
  source 1..76: mol_type = other DNA

SEQ ID NO: 19370 - DNA, 76 bp, synthetic construct; identical to SEQ ID NO: 11012
  source 1..76: mol_type = other DNA

SEQ ID NO: 19371 - DNA, 76 bp, synthetic construct; identical to SEQ ID NO: 11012
  source 1..76: mol_type = other DNA

SEQ ID NO: 19372 - DNA, 76 bp, synthetic construct; identical to SEQ ID NO: 11012
  source 1..76: mol_type = other DNA

SEQ ID NO: 19373 - DNA, 76 bp, synthetic construct; identical to SEQ ID NO: 11012
  source 1..76: mol_type = other DNA

SEQ ID NO: 19374 - DNA, 76 bp, synthetic construct; identical to SEQ ID NO: 11012
  source 1..76: mol_type = other DNA

SEQ ID NO: 19375 - DNA, 76 bp, synthetic construct; identical to SEQ ID NO: 11012
  source 1..76: mol_type = other DNA

SEQ ID NO: 19376 - DNA, 76 bp, synthetic construct; identical to SEQ ID NO: 11012
  source 1..76: mol_type = other DNA

SEQ ID NO: 19377 - DNA, 76 bp, synthetic construct; identical to SEQ ID NO: 11012
  source 1..76: mol_type = other DNA

SEQ ID NO: 19378 - DNA, 76 bp, synthetic construct; identical to SEQ ID NO: 11012
  source 1..76: mol_type = other DNA

SEQ ID NO: 19379 - DNA, 76 bp, synthetic construct; identical to SEQ ID NO: 11012
  source 1..76: mol_type = other DNA

SEQ ID NO: 19380 - DNA, 76 bp, synthetic construct; identical to SEQ ID NO: 11012
  source 1..76: mol_type = other DNA

SEQ ID NO: 19381 - DNA, 76 bp, synthetic construct; identical to SEQ ID NO: 11012
  source 1..76: mol_type = other DNA

SEQ ID NO: 19382 - DNA, 76 bp, synthetic construct; identical to SEQ ID NO: 11012
  source 1..76: mol_type = other DNA

SEQ ID NO: 19383 - DNA, 76 bp, synthetic construct; identical to SEQ ID NO: 11012
  source 1..76: mol_type = other DNA

SEQ ID NO: 19384 - DNA, 76 bp, synthetic construct; identical to SEQ ID NO: 11012
  source 1..76: mol_type = other DNA

SEQ ID NO: 19385 - DNA, 76 bp, synthetic construct; identical to SEQ ID NO: 11012
  source 1..76: mol_type = other DNA

SEQ ID NO: 19386 - DNA, 76 bp, synthetic construct; identical to SEQ ID NO: 11012
  source 1..76: mol_type = other DNA

SEQ ID NO: 19387 - DNA, 76 bp, synthetic construct; identical to SEQ ID NO: 11012
  source 1..76: mol_type = other DNA

SEQ ID NO: 19388 - DNA, 76 bp, synthetic construct; identical to SEQ ID NO: 11012
  source 1..76: mol_type = other DNA

SEQ ID NO: 19389 - DNA, 76 bp, synthetic construct; identical to SEQ ID NO: 11012
  source 1..76: mol_type = other DNA

SEQ ID NO: 19390 - DNA, 76 bp, synthetic construct; identical to SEQ ID NO: 11012
  source 1..76: mol_type = other DNA

SEQ ID NO: 19391 - DNA, 76 bp, synthetic construct; identical to SEQ ID NO: 11012
  source 1..76: mol_type = other DNA

SEQ ID NO: 19392 - DNA, 76 bp, synthetic construct; identical to SEQ ID NO: 11012
  source 1..76: mol_type = other DNA

SEQ ID NO: 19393 - DNA, 76 bp, synthetic construct; identical to SEQ ID NO: 11012
  source 1..76: mol_type = other DNA

SEQ ID NO: 19394 - DNA, 76 bp, synthetic construct; identical to SEQ ID NO: 11012
  source 1..76: mol_type = other DNA

SEQ ID NO: 19395 - DNA, 76 bp, synthetic construct; identical to SEQ ID NO: 11012
  source 1..76: mol_type = other DNA

SEQ ID NO: 19396 - DNA, 76 bp, synthetic construct; identical to SEQ ID NO: 11012
  source 1..76: mol_type = other DNA

SEQ ID NO: 19397 - DNA, 76 bp, synthetic construct; identical to SEQ ID NO: 11012
  source 1..76: mol_type = other DNA

SEQ ID NO: 19398 - DNA, 76 bp, synthetic construct; identical to SEQ ID NO: 11012
  source 1..76: mol_type = other DNA

SEQ ID NO: 19399 - DNA, 76 bp, synthetic construct; identical to SEQ ID NO: 11012
  source 1..76: mol_type = other DNA

SEQ ID NO: 19400 - DNA, 76 bp, synthetic construct; identical to SEQ ID NO: 11012
  source 1..76: mol_type = other DNA

SEQ ID NO: 19401 - DNA, 76 bp, synthetic construct; identical to SEQ ID NO: 11012
  source 1..76: mol_type = other DNA

SEQ ID NO: 19402 - DNA, 76 bp, synthetic construct; identical to SEQ ID NO: 11012
  source 1..76: mol_type = other DNA

SEQ ID NO: 19403 - DNA, 76 bp, synthetic construct; identical to SEQ ID NO: 11012
  source 1..76: mol_type = other DNA

SEQ ID NO: 19404 - DNA, 76 bp, synthetic construct; identical to SEQ ID NO: 11012
  source 1..76: mol_type = other DNA

SEQ ID NO: 19405 - DNA, 76 bp, synthetic construct; identical to SEQ ID NO: 11012
  source 1..76: mol_type = other DNA

SEQ ID NO: 19406 - DNA, 76 bp, synthetic construct; identical to SEQ ID NO: 11012
  source 1..76: mol_type = other DNA

SEQ ID NO: 19407 - DNA, 76 bp, synthetic construct; identical to SEQ ID NO: 11012
  source 1..76: mol_type = other DNA

SEQ ID NO: 19408 - DNA, 76 bp, synthetic construct; identical to SEQ ID NO: 11012
  source 1..76: mol_type = other DNA

SEQ ID NO: 19409 - DNA, 76 bp, synthetic construct; identical to SEQ ID NO: 11012
  source 1..76: mol_type = other DNA

SEQ ID NO: 19410 - DNA, 76 bp, synthetic construct; identical to SEQ ID NO: 11012
  source 1..76: mol_type = other DNA

SEQ ID NO: 19411 - DNA, 76 bp, synthetic construct; identical to SEQ ID NO: 11012
  source 1..76: mol_type = other DNA

SEQ ID NO: 19412 - DNA, 76 bp, synthetic construct; identical to SEQ ID NO: 11012
  source 1..76: mol_type = other DNA

SEQ ID NO: 19413 - DNA, 76 bp, synthetic construct; identical to SEQ ID NO: 11012
  source 1..76: mol_type = other DNA

SEQ ID NO: 19414 - DNA, 76 bp, synthetic construct; identical to SEQ ID NO: 11012
  source 1..76: mol_type = other DNA

SEQ ID NO: 19415 - DNA, 76 bp, synthetic construct; identical to SEQ ID NO: 11012
  source 1..76: mol_type = other DNA

SEQ ID NO: 19416 - DNA, 76 bp, synthetic construct; identical to SEQ ID NO: 11012
  source 1..76: mol_type = other DNA

SEQ ID NO: 19417 - DNA, 76 bp, synthetic construct; identical to SEQ ID NO: 11012
  source 1..76: mol_type = other DNA

SEQ ID NO: 19418 - DNA, 76 bp, synthetic construct; identical to SEQ ID NO: 11012
  source 1..76: mol_type = other DNA

SEQ ID NO: 19419 - DNA, 76 bp, synthetic construct; identical to SEQ ID NO: 11012
  source 1..76: mol_type = other DNA

SEQ ID NO: 19420 - DNA, 76 bp, synthetic construct; identical to SEQ ID NO: 11012
  source 1..76: mol_type = other DNA

SEQ ID NO: 19421 - DNA, 76 bp, synthetic construct; identical to SEQ ID NO: 11012
  source 1..76: mol_type = other DNA

SEQ ID NO: 19422 - DNA, 76 bp, synthetic construct; identical to SEQ ID NO: 11012
  source 1..76: mol_type = other DNA

SEQ ID NO: 19423 - DNA, 76 bp, synthetic construct; identical to SEQ ID NO: 11012
  source 1..76: mol_type = other DNA

SEQ ID NO: 19424 - DNA, 76 bp, synthetic construct; identical to SEQ ID NO: 11012
  source 1..76: mol_type = other DNA

SEQ ID NO: 19425 - DNA, 76 bp, synthetic construct; identical to SEQ ID NO: 11012
  source 1..76: mol_type = other DNA

SEQ ID NO: 19426 - DNA, 76 bp, synthetic construct; identical to SEQ ID NO: 11012
  source 1..76: mol_type = other DNA

SEQ ID NO: 19427 - DNA, 76 bp, synthetic construct; identical to SEQ ID NO: 11012
  source 1..76: mol_type = other DNA

SEQ ID NO: 19428 - DNA, 76 bp, synthetic construct; identical to SEQ ID NO: 11012
  source 1..76: mol_type = other DNA

SEQ ID NO: 19429 - DNA, 76 bp, synthetic construct; identical to SEQ ID NO: 11012
  source 1..76: mol_type = other DNA

SEQ ID NO: 19430 - DNA, 76 bp, synthetic construct; identical to SEQ ID NO: 11012
  source 1..76: mol_type = other DNA

SEQ ID NO: 19431 - DNA, 17 bp, synthetic construct
  source 1..17: mol_type = other DNA
gagtcaggtgcaccatg

SEQ ID NO: 19432 - DNA, 16 bp, synthetic construct
  source 1..16: mol_type = other DNA
gagtcaggtgcaccat

SEQ ID NO: 19433 - DNA, 15 bp, synthetic construct
  source 1..15: mol_type = other DNA
gagtcaggtgcacca

SEQ ID NO: 19434 - DNA, 14 bp, synthetic construct
  source 1..14: mol_type = other DNA
gagtcaggtgcacc

SEQ ID NO: 19435 - DNA, 13 bp, synthetic construct
  source 1..13: mol_type = other DNA
gagtcaggtgcac

SEQ ID NO: 19436 - DNA, 12 bp, synthetic construct
  source 1..12: mol_type = other DNA
gagtcaggtgca

SEQ ID NO: 19437 - DNA, 11 bp, synthetic construct
  source 1..11: mol_type = other DNA
gagtcaggtgc

SEQ ID NO: 19438 - DNA, 10 bp, synthetic construct
  source 1..10: mol_type = other DNA
gagtcaggtg

SEQ ID NO: 19439-19440 - skipped (2 entries)

SEQ ID NO: 19441 - DNA, 17 bp, synthetic construct
  source 1..17: mol_type = other DNA
gagtcaggtgcaccatg

SEQ ID NO: 19442 - DNA, 16 bp, synthetic construct
  source 1..16: mol_type = other DNA
gagtcaggtgcaccat

SEQ ID NO: 19443 - DNA, 15 bp, synthetic construct
  source 1..15: mol_type = other DNA
gagtcaggtgcacca

SEQ ID NO: 19444 - DNA, 14 bp, synthetic construct
  source 1..14: mol_type = other DNA
gagtcaggtgcacc

SEQ ID NO: 19445 - DNA, 13 bp, synthetic construct
  source 1..13: mol_type = other DNA
gagtcaggtgcac

SEQ ID NO: 19446 - DNA, 12 bp, synthetic construct
  source 1..12: mol_type = other DNA
gagtcaggtgca

SEQ ID NO: 19447 - DNA, 11 bp, synthetic construct
  source 1..11: mol_type = other DNA
gagtcaggtgc

SEQ ID NO: 19448 - DNA, 10 bp, synthetic construct
  source 1..10: mol_type = other DNA
gagtcaggtg

SEQ ID NO: 19449-19450 - skipped (2 entries)

SEQ ID NO: 19451 - DNA, 17 bp, synthetic construct
  source 1..17: mol_type = other DNA
gagtcaggtgcaccatg

SEQ ID NO: 19452 - DNA, 16 bp, synthetic construct
  source 1..16: mol_type = other DNA
gagtcaggtgcaccat

SEQ ID NO: 19453 - DNA, 15 bp, synthetic construct
  source 1..15: mol_type = other DNA
gagtcaggtgcacca

SEQ ID NO: 19454 - DNA, 14 bp, synthetic construct
  source 1..14: mol_type = other DNA
gagtcaggtgcacc

SEQ ID NO: 19455 - DNA, 13 bp, synthetic construct
  source 1..13: mol_type = other DNA
gagtcaggtgcac

SEQ ID NO: 19456 - DNA, 12 bp, synthetic construct
  source 1..12: mol_type = other DNA
gagtcaggtgca

SEQ ID NO: 19457 - DNA, 11 bp, synthetic construct
  source 1..11: mol_type = other DNA
gagtcaggtgc

SEQ ID NO: 19458 - DNA, 10 bp, synthetic construct
  source 1..10: mol_type = other DNA
gagtcaggtg

SEQ ID NO: 19459-19460 - skipped (2 entries)

SEQ ID NO: 19461 - DNA, 17 bp, synthetic construct
  source 1..17: mol_type = other DNA
gagtcaggtgcaccatg

SEQ ID NO: 19462 - DNA, 16 bp, synthetic construct
  source 1..16: mol_type = other DNA
gagtcaggtgcaccat

SEQ ID NO: 19463 - DNA, 15 bp, synthetic construct
  source 1..15: mol_type = other DNA
gagtcaggtgcacca

SEQ ID NO: 19464 - DNA, 14 bp, synthetic construct
  source 1..14: mol_type = other DNA
gagtcaggtgcacc

SEQ ID NO: 19465 - DNA, 13 bp, synthetic construct
  source 1..13: mol_type = other DNA
gagtcaggtgcac

SEQ ID NO: 19466 - DNA, 12 bp, synthetic construct
  source 1..12: mol_type = other DNA
gagtcaggtgca

SEQ ID NO: 19467 - DNA, 11 bp, synthetic construct
  source 1..11: mol_type = other DNA
gagtcaggtgc

SEQ ID NO: 19468 - DNA, 10 bp, synthetic construct
  source 1..10: mol_type = other DNA
gagtcaggtg

SEQ ID NO: 19469-19470 - skipped (2 entries)

SEQ ID NO: 19471 - DNA, 17 bp, synthetic construct
  source 1..17: mol_type = other DNA
gagtcaggtgcaccatg

SEQ ID NO: 19472 - DNA, 16 bp, synthetic construct
  source 1..16: mol_type = other DNA
gagtcaggtgcaccat

SEQ ID NO: 19473 - DNA, 15 bp, synthetic construct
  source 1..15: mol_type = other DNA
gagtcaggtgcacca

SEQ ID NO: 19474 - DNA, 14 bp, synthetic construct
  source 1..14: mol_type = other DNA
gagtcaggtgcacc

SEQ ID NO: 19475 - DNA, 13 bp, synthetic construct
  source 1..13: mol_type = other DNA
gagtcaggtgcac

SEQ ID NO: 19476 - DNA, 12 bp, synthetic construct
  source 1..12: mol_type = other DNA
gagtcaggtgca

SEQ ID NO: 19477 - DNA, 11 bp, synthetic construct
  source 1..11: mol_type = other DNA
gagtcaggtgc

SEQ ID NO: 19478 - DNA, 10 bp, synthetic construct
  source 1..10: mol_type = other DNA
gagtcaggtg

SEQ ID NO: 19479-19480 - skipped (2 entries)

SEQ ID NO: 19481 - DNA, 17 bp, synthetic construct
  source 1..17: mol_type = other DNA
gagtcaggtgcaccatg

SEQ ID NO: 19482 - DNA, 16 bp, synthetic construct
  source 1..16: mol_type = other DNA
gagtcaggtgcaccat

SEQ ID NO: 19483 - DNA, 15 bp, synthetic construct
  source 1..15: mol_type = other DNA
gagtcaggtgcacca

SEQ ID NO: 19484 - DNA, 14 bp, synthetic construct
  source 1..14: mol_type = other DNA
gagtcaggtgcacc

SEQ ID NO: 19485 - DNA, 13 bp, synthetic construct
  source 1..13: mol_type = other DNA
gagtcaggtgcac

SEQ ID NO: 19486 - DNA, 12 bp, synthetic construct
  source 1..12: mol_type = other DNA
gagtcaggtgca

SEQ ID NO: 19487 - DNA, 11 bp, synthetic construct
  source 1..11: mol_type = other DNA
gagtcaggtgc

SEQ ID NO: 19488 - DNA, 10 bp, synthetic construct
  source 1..10: mol_type = other DNA
gagtcaggtg

SEQ ID NO: 19489-19490 - skipped (2 entries)

SEQ ID NO: 19491 - DNA, 17 bp, synthetic construct
  source 1..17: mol_type = other DNA
gagtcaggtgcaccatg

SEQ ID NO: 19492 - DNA, 16 bp, synthetic construct
  source 1..16: mol_type = other DNA
gagtcaggtgcaccat

SEQ ID NO: 19493 - DNA, 15 bp, synthetic construct
  source 1..15: mol_type = other DNA
gagtcaggtgcacca

SEQ ID NO: 19494 - DNA, 14 bp, synthetic construct
  source 1..14: mol_type = other DNA
gagtcaggtgcacc

SEQ ID NO: 19495 - DNA, 13 bp, synthetic construct
  source 1..13: mol_type = other DNA
gagtcaggtgcac

SEQ ID NO: 19496 - DNA, 12 bp, synthetic construct
  source 1..12: mol_type = other DNA
gagtcaggtgca

SEQ ID NO: 19497 - DNA, 11 bp, synthetic construct
  source 1..11: mol_type = other DNA
gagtcaggtgc

SEQ ID NO: 19498 - DNA, 10 bp, synthetic construct
  source 1..10: mol_type = other DNA
gagtcaggtg

SEQ ID NO: 19499-19500 - skipped (2 entries)

SEQ ID NO: 19501 - DNA, 17 bp, synthetic construct
  source 1..17: mol_type = other DNA
gagtcaggtgcaccatg

SEQ ID NO: 19502 - DNA, 16 bp, synthetic construct
  source 1..16: mol_type = other DNA
gagtcaggtgcaccat

SEQ ID NO: 19503 - DNA, 15 bp, synthetic construct
  source 1..15: mol_type = other DNA
gagtcaggtgcacca

SEQ ID NO: 19504 - DNA, 14 bp, synthetic construct
  source 1..14: mol_type = other DNA
gagtcaggtgcacc

SEQ ID NO: 19505 - DNA, 13 bp, synthetic construct
  source 1..13: mol_type = other DNA
gagtcaggtgcac

SEQ ID NO: 19506 - DNA, 12 bp, synthetic construct
  source 1..12: mol_type = other DNA
gagtcaggtgca

SEQ ID NO: 19507 - DNA, 11 bp, synthetic construct
  source 1..11: mol_type = other DNA
gagtcaggtgc

SEQ ID NO: 19508 - DNA, 10 bp, synthetic construct
  source 1..10: mol_type = other DNA
gagtcaggtg

SEQ ID NO: 19509-19510 - skipped (2 entries)

SEQ ID NO: 19511 - DNA, 17 bp, synthetic construct
  source 1..17: mol_type = other DNA
gagtcaggtgcaccatg

SEQ ID NO: 19512 - DNA, 16 bp, synthetic construct
  source 1..16: mol_type = other DNA
gagtcaggtgcaccat

SEQ ID NO: 19513 - DNA, 15 bp, synthetic construct
  source 1..15: mol_type = other DNA
gagtcaggtgcacca

SEQ ID NO: 19514 - DNA, 14 bp, synthetic construct
  source 1..14: mol_type = other DNA
gagtcaggtgcacc

SEQ ID NO: 19515 - DNA, 13 bp, synthetic construct
  source 1..13: mol_type = other DNA
gagtcaggtgcac

SEQ ID NO: 19516 - DNA, 12 bp, synthetic construct
  source 1..12: mol_type = other DNA
gagtcaggtgca

SEQ ID NO: 19517 - DNA, 11 bp, synthetic construct
  source 1..11: mol_type = other DNA
gagtcaggtgc

SEQ ID NO: 19518 - DNA, 10 bp, synthetic construct
  source 1..10: mol_type = other DNA
gagtcaggtg

SEQ ID NO: 19519-19520 - skipped (2 entries)

SEQ ID NO: 19521 - DNA, 20 bp, synthetic construct
  source 1..20: mol_type = other DNA
aacggcagacttctcttcag

SEQ ID NO: 19522 - DNA, 20 bp, synthetic construct
  source 1..20: mol_type = other DNA
aacggcagacttctcttcag

SEQ ID NO: 19523 - DNA, 20 bp, synthetic construct
  source 1..20: mol_type = other DNA
aacggcagacttctcttcag

SEQ ID NO: 19524 - DNA, 20 bp, synthetic construct
  source 1..20: mol_type = other DNA
aacggcagacttctcttcag

SEQ ID NO: 19525 - DNA, 20 bp, synthetic construct
  source 1..20: mol_type = other DNA
aacggcagacttctcttcag

SEQ ID NO: 19526 - DNA, 20 bp, synthetic construct
  source 1..20: mol_type = other DNA
aacggcagacttctcttcag

SEQ ID NO: 19527 - DNA, 20 bp, synthetic construct
  source 1..20: mol_type = other DNA
aacggcagacttctcttcag

SEQ ID NO: 19528 - DNA, 20 bp, synthetic construct
  source 1..20: mol_type = other DNA
aacggcagacttctcttcag

SEQ ID NO: 19529 - DNA, 20 bp, synthetic construct
  source 1..20: mol_type = other DNA
aacggcagacttctcttcag

SEQ ID NO: 19530 - DNA, 20 bp, synthetic construct
  source 1..20: mol_type = other DNA
aacggcagacttctcttcag

SEQ ID NO: 19531 - DNA, 19 bp, synthetic construct
  source 1..19: mol_type = other DNA
acggcagacttctcttcag

SEQ ID NO: 19532 - DNA, 19 bp, synthetic construct
  source 1..19: mol_type = other DNA
acggcagacttctcttcag

SEQ ID NO: 19533 - DNA, 19 bp, synthetic construct
  source 1..19: mol_type = other DNA
acggcagacttctcttcag

SEQ ID NO: 19534 - DNA, 19 bp, synthetic construct
  source 1..19: mol_type = other DNA
acggcagacttctcttcag

SEQ ID NO: 19535 - DNA, 19 bp, synthetic construct
  source 1..19: mol_type = other DNA
acggcagacttctcttcag

SEQ ID NO: 19536 - DNA, 19 bp, synthetic construct
  source 1..19: mol_type = other DNA
acggcagacttctcttcag

SEQ ID NO: 19537 - DNA, 19 bp, synthetic construct
  source 1..19: mol_type = other DNA
acggcagacttctcttcag

SEQ ID NO: 19538 - DNA, 19 bp, synthetic construct
  source 1..19: mol_type = other DNA
acggcagacttctcttcag

SEQ ID NO: 19539 - DNA, 19 bp, synthetic construct
  source 1..19: mol_type = other DNA
acggcagacttctcttcag

SEQ ID NO: 19540 - DNA, 19 bp, synthetic construct
  source 1..19: mol_type = other DNA
acggcagacttctcttcag

SEQ ID NO: 19541 - DNA, 17 bp, synthetic construct
  source 1..17: mol_type = other DNA
ggcagacttctcttcag

SEQ ID NO: 19542 - DNA, 17 bp, synthetic construct
  source 1..17: mol_type = other DNA
ggcagacttctcttcag

SEQ ID NO: 19543 - DNA, 17 bp, synthetic construct
  source 1..17: mol_type = other DNA
ggcagacttctcttcag

SEQ ID NO: 19544 - DNA, 17 bp, synthetic construct
  source 1..17: mol_type = other DNA
ggcagacttctcttcag

SEQ ID NO: 19545 - DNA, 17 bp, synthetic construct
  source 1..17: mol_type = other DNA
ggcagacttctcttcag

SEQ ID NO: 19546 - DNA, 17 bp, synthetic construct
  source 1..17: mol_type = other DNA
ggcagacttctcttcag

SEQ ID NO: 19547 - DNA, 17 bp, synthetic construct
  source 1..17: mol_type = other DNA
ggcagacttctcttcag

SEQ ID NO: 19548 - DNA, 17 bp, synthetic construct
  source 1..17: mol_type = other DNA
ggcagacttctcttcag

SEQ ID NO: 19549 - DNA, 17 bp, synthetic construct
  source 1..17: mol_type = other DNA
ggcagacttctcttcag

SEQ ID NO: 19550 - DNA, 17 bp, synthetic construct
  source 1..17: mol_type = other DNA
ggcagacttctcttcag

SEQ ID NO: 19551 - DNA, 16 bp, synthetic construct
  source 1..16: mol_type = other DNA
gcagacttctcttcag

SEQ ID NO: 19552 - DNA, 16 bp, synthetic construct
  source 1..16: mol_type = other DNA
gcagacttctcttcag

SEQ ID NO: 19553 - DNA, 16 bp, synthetic construct
  source 1..16: mol_type = other DNA
gcagacttctcttcag

SEQ ID NO: 19554 - DNA, 16 bp, synthetic construct
  source 1..16: mol_type = other DNA
gcagacttctcttcag

SEQ ID NO: 19555 - DNA, 16 bp, synthetic construct
  source 1..16: mol_type = other DNA
gcagacttctcttcag

SEQ ID NO: 19556 - DNA, 16 bp, synthetic construct
  source 1..16: mol_type = other DNA
gcagacttctcttcag

SEQ ID NO: 19557 - DNA, 16 bp, synthetic construct
  source 1..16: mol_type = other DNA
gcagacttctcttcag

SEQ ID NO: 19558 - DNA, 16 bp, synthetic construct
  source 1..16: mol_type = other DNA
gcagacttctcttcag

SEQ ID NO: 19559 - DNA, 16 bp, synthetic construct
  source 1..16: mol_type = other DNA
gcagacttctcttcag

SEQ ID NO: 19560 - DNA, 16 bp, synthetic construct
  source 1..16: mol_type = other DNA
gcagacttctcttcag

SEQ ID NO: 19561 - DNA, 14 bp, synthetic construct
  source 1..14: mol_type = other DNA
agacttctcttcag

SEQ ID NO: 19562 - DNA, 14 bp, synthetic construct
  source 1..14: mol_type = other DNA
agacttctcttcag

SEQ ID NO: 19563 - DNA, 14 bp, synthetic construct
  source 1..14: mol_type = other DNA
agacttctcttcag

SEQ ID NO: 19564 - DNA, 14 bp, synthetic construct
  source 1..14: mol_type = other DNA
agacttctcttcag

SEQ ID NO: 19565 - DNA, 14 bp, synthetic construct
  source 1..14: mol_type = other DNA
agacttctcttcag

SEQ ID NO: 19566 - DNA, 14 bp, synthetic construct
  source 1..14: mol_type = other DNA
agacttctcttcag

SEQ ID NO: 19567 - DNA, 14 bp, synthetic construct
  source 1..14: mol_type = other DNA
agacttctcttcag

SEQ ID NO: 19568 - DNA, 14 bp, synthetic construct
  source 1..14: mol_type = other DNA
agacttctcttcag

SEQ ID NO: 19569 - DNA, 14 bp, synthetic construct
  source 1..14: mol_type = other DNA
agacttctcttcag

SEQ ID NO: 19570 - DNA, 14 bp, synthetic construct
  source 1..14: mol_type = other DNA
agacttctcttcag

SEQ ID NO: 19571 - DNA, 13 bp, synthetic construct
  source 1..13: mol_type = other DNA
gacttctcttcag

SEQ ID NO: 19572 - DNA, 13 bp, synthetic construct
  source 1..13: mol_type = other DNA
gacttctcttcag

SEQ ID NO: 19573 - DNA, 13 bp, synthetic construct
  source 1..13: mol_type = other DNA
gacttctcttcag

SEQ ID NO: 19574 - DNA, 13 bp, synthetic construct
  source 1..13: mol_type = other DNA
gacttctcttcag

SEQ ID NO: 19575 - DNA, 13 bp, synthetic construct
  source 1..13: mol_type = other DNA
gacttctcttcag

SEQ ID NO: 19576 - DNA, 13 bp, synthetic construct
  source 1..13: mol_type = other DNA
gacttctcttcag

SEQ ID NO: 19577 - DNA, 13 bp, synthetic construct
  source 1..13: mol_type = other DNA
gacttctcttcag

SEQ ID NO: 19578 - DNA, 13 bp, synthetic construct
  source 1..13: mol_type = other DNA
gacttctcttcag

SEQ ID NO: 19579 - DNA, 13 bp, synthetic construct
  source 1..13: mol_type = other DNA
gacttctcttcag

SEQ ID NO: 19580 - DNA, 13 bp, synthetic construct
  source 1..13: mol_type = other DNA
gacttctcttcag

SEQ ID NO: 19581 - DNA, 12 bp, synthetic construct
  source 1..12: mol_type = other DNA
acttctcttcag

SEQ ID NO: 19582 - DNA, 12 bp, synthetic construct
  source 1..12: mol_type = other DNA
acttctcttcag

SEQ ID NO: 19583 - DNA, 12 bp, synthetic construct
  source 1..12: mol_type = other DNA
acttctcttcag

SEQ ID NO: 19584 - DNA, 12 bp, synthetic construct
  source 1..12: mol_type = other DNA
acttctcttcag

SEQ ID NO: 19585 - DNA, 12 bp, synthetic construct
  source 1..12: mol_type = other DNA
acttctcttcag

SEQ ID NO: 19586 - DNA, 12 bp, synthetic construct
  source 1..12: mol_type = other DNA
acttctcttcag

SEQ ID NO: 19587 - DNA, 12 bp, synthetic construct
  source 1..12: mol_type = other DNA
acttctcttcag

SEQ ID NO: 19588 - DNA, 12 bp, synthetic construct
  source 1..12: mol_type = other DNA
acttctcttcag

SEQ ID NO: 19589 - DNA, 12 bp, synthetic construct
  source 1..12: mol_type = other DNA
acttctcttcag

SEQ ID NO: 19590 - DNA, 12 bp, synthetic construct
  source 1..12: mol_type = other DNA
acttctcttcag

SEQ ID NO: 19591 - DNA, 10 bp, synthetic construct
  source 1..10: mol_type = other DNA
ttctcttcag

SEQ ID NO: 19592 - DNA, 10 bp, synthetic construct
  source 1..10: mol_type = other DNA
ttctcttcag

SEQ ID NO: 19593 - DNA, 10 bp, synthetic construct
  source 1..10: mol_type = other DNA
ttctcttcag

SEQ ID NO: 19594 - DNA, 10 bp, synthetic construct
  source 1..10: mol_type = other DNA
ttctcttcag

SEQ ID NO: 19595 - DNA, 10 bp, synthetic construct
  source 1..10: mol_type = other DNA
ttctcttcag

SEQ ID NO: 19596 - DNA, 10 bp, synthetic construct
  source 1..10: mol_type = other DNA
ttctcttcag

SEQ ID NO: 19597 - DNA, 10 bp, synthetic construct
  source 1..10: mol_type = other DNA
ttctcttcag

SEQ ID NO: 19598 - DNA, 10 bp, synthetic construct
  source 1..10: mol_type = other DNA
ttctcttcag

SEQ ID NO: 19599 - DNA, 10 bp, synthetic construct
  source 1..10: mol_type = other DNA
ttctcttcag

SEQ ID NO: 19600 - DNA, 10 bp, synthetic construct
  source 1..10: mol_type = other DNA
ttctcttcag

SEQ ID NO: 19601-19610 - skipped (10 entries)

SEQ ID NO: 19611 - DNA, 133 bp, synthetic construct
  source 1..133: mol_type = other DNA
catggtgcacctgactcctggttttagagctagaaatagcaagttaaaataaggctagtccgttatcaacttgaaaaagtggcaccgagtcggtgcaacggcagacttctcttcaggagtcaggtgcaccatg

SEQ ID NO: 19612 - DNA, 132 bp, synthetic construct
  source 1..132: mol_type = other DNA
catggtgcacctgactcctggttttagagctagaaatagcaagttaaaataaggctagtccgttatcaacttgaaaaagtggcaccgagtcggtgcaacggcagacttctcttcaggagtcaggtgcaccat

SEQ ID NO: 19613 - DNA, 131 bp, synthetic construct
  source 1..131: mol_type = other DNA
catggtgcacctgactcctggttttagagctagaaatagcaagttaaaataaggctagtccgttatcaacttgaaaaagtggcaccgagtcggtgcaacggcagacttctcttcaggagtcaggtgcacca

SEQ ID NO: 19614 - DNA, 130 bp, synthetic construct
  source 1..130: mol_type = other DNA
catggtgcacctgactcctggttttagagctagaaatagcaagttaaaataaggctagtccgttatcaacttgaaaaagtggcaccgagtcggtgcaacggcagacttctcttcaggagtcaggtgcacc

SEQ ID NO: 19615 - DNA, 129 bp, synthetic construct
  source 1..129: mol_type = other DNA
catggtgcacctgactcctggttttagagctagaaatagcaagttaaaataaggctagtccgttatcaacttgaaaaagtggcaccgagtcggtgcaacggcagacttctcttcaggagtcaggtgcac

SEQ ID NO: 19616 - DNA, 128 bp, synthetic construct
  source 1..128: mol_type = other DNA
catggtgcacctgactcctggttttagagctagaaatagcaagttaaaataaggctagtccgttatcaacttgaaaaagtggcaccgagtcggtgcaacggcagacttctcttcaggagtcaggtgca

SEQ ID NO: 19617 - DNA, 127 bp, synthetic construct
  source 1..127: mol_type = other DNA
catggtgcacctgactcctggttttagagctagaaatagcaagttaaaataaggctagtccgttatcaacttgaaaaagtggcaccgagtcggtgcaacggcagacttctcttcaggagtcaggtgc

SEQ ID NO: 19618 - DNA, 126 bp, synthetic construct
  source 1..126: mol_type = other DNA
catggtgcacctgactcctggttttagagctagaaatagcaagttaaaataaggctagtccgttatcaacttgaaaaagtggcaccgagtcggtgcaacggcagacttctcttcaggagtcaggtg

SEQ ID NO: 19619 - DNA, 125 bp, synthetic construct
  source 1..125: mol_type = other DNA
catggtgcacctgactcctggttttagagctagaaatagcaagttaaaataaggctagtccgttatcaacttgaaaaagtggcaccgagtcggtgcaacggcagacttctcttcaggagtcaggt

SEQ ID NO: 19620 - DNA, 124 bp, synthetic construct
  source 1..124: mol_type = other DNA
catggtgcacctgactcctggttttagagctagaaatagcaagttaaaataaggctagtccgttatcaacttgaaaaagtggcaccgagtcggtgcaacggcagacttctcttcaggagtcagg

SEQ ID NO: 19621 - DNA, 132 bp, synthetic construct
  source 1..132: mol_type = other DNA
catggtgcacctgactcctggttttagagctagaaatagcaagttaaaataaggctagtccgttatcaacttgaaaaagtggcaccgagtcggtgcacggcagacttctcttcaggagtcaggtgcaccatg

SEQ ID NO: 19622 - DNA, 131 bp, synthetic construct
  source 1..131: mol_type = other DNA
catggtgcacctgactcctggttttagagctagaaatagcaagttaaaataaggctagtccgttatcaacttgaaaaagtggcaccgagtcggtgcacggcagacttctcttcaggagtcaggtgcaccat

SEQ ID NO: 19623 - DNA, 130 bp, synthetic construct
  source 1..130: mol_type = other DNA
catggtgcacctgactcctggttttagagctagaaatagcaagttaaaataaggctagtccgttatcaacttgaaaaagtggcaccgagtcggtgcacggcagacttctcttcaggagtcaggtgcacca

SEQ ID NO: 19624 - DNA, 129 bp, synthetic construct
  source 1..129: mol_type = other DNA
catggtgcacctgactcctggttttagagctagaaatagcaagttaaaataaggctagtccgttatcaacttgaaaaagtggcaccgagtcggtgcacggcagacttctcttcaggagtcaggtgcacc

SEQ ID NO: 19625 - DNA, 128 bp, synthetic construct
  source 1..128: mol_type = other DNA
catggtgcacctgactcctggttttagagctagaaatagcaagttaaaataaggctagtccgttatcaacttgaaaaagtggcaccgagtcggtgcacggcagacttctcttcaggagtcaggtgcac

SEQ ID NO: 19626 - DNA, 127 bp, synthetic construct
  source 1..127: mol_type = other DNA
catggtgcacctgactcctggttttagagctagaaatagcaagttaaaataaggctagtccgttatcaacttgaaaaagtggcaccgagtcggtgcacggcagacttctcttcaggagtcaggtgca

SEQ ID NO: 19627 - DNA, 126 bp, synthetic construct
  source 1..126: mol_type = other DNA
catggtgcacctgactcctggttttagagctagaaatagcaagttaaaataaggctagtccgttatcaacttgaaaaagtggcaccgagtcggtgcacggcagacttctcttcaggagtcaggtgc

SEQ ID NO: 19628 - DNA, 125 bp, synthetic construct
  source 1..125: mol_type = other DNA
catggtgcacctgactcctggttttagagctagaaatagcaagttaaaataaggctagtccgttatcaacttgaaaaagtggcaccgagtcggtgcacggcagacttctcttcaggagtcaggtg

SEQ ID NO: 19629 - DNA, 124 bp, synthetic construct
  source 1..124: mol_type = other DNA
catggtgcacctgactcctggttttagagctagaaatagcaagttaaaataaggctagtccgttatcaacttgaaaaagtggcaccgagtcggtgcacggcagacttctcttcaggagtcaggt

SEQ ID NO: 19630 - DNA, 123 bp, synthetic construct
  source 1..123: mol_type = other DNA
catggtgcacctgactcctggttttagagctagaaatagcaagttaaaataaggctagtccgttatcaacttgaaaaagtggcaccgagtcggtgcacggcagacttctcttcaggagtcagg

SEQ ID NO: 19631 - DNA, 130 bp, synthetic construct
  source 1..130: mol_type = other DNA
catggtgcacctgactcctggttttagagctagaaatagcaagttaaaataaggctagtccgttatcaacttgaaaaagtggcaccgagtcggtgcggcagacttctcttcaggagtcaggtgcaccatg

SEQ ID NO: 19632 - DNA, 129 bp, synthetic construct
  source 1..129: mol_type = other DNA
catggtgcacctgactcctggttttagagctagaaatagcaagttaaaataaggctagtccgttatcaacttgaaaaagtggcaccgagtcggtgcggcagacttctcttcaggagtcaggtgcaccat

SEQ ID NO: 19633 - DNA, 128 bp, synthetic construct
  source 1..128: mol_type = other DNA
catggtgcacctgactcctggttttagagctagaaatagcaagttaaaataaggctagtccgttatcaacttgaaaaagtggcaccgagtcggtgcggcagacttctcttcaggagtcaggtgcacca

SEQ ID NO: 19634 - DNA, 127 bp, synthetic construct
  source 1..127: mol_type = other DNA
catggtgcacctgactcctggttttagagctagaaatagcaagttaaaataaggctagtccgttatcaacttgaaaaagtggcaccgagtcggtgcggcagacttctcttcaggagtcaggtgcacc

SEQ ID NO: 19635 - DNA, 126 bp, synthetic construct
  source 1..126: mol_type = other DNA
catggtgcacctgactcctggttttagagctagaaatagcaagttaaaataaggctagtccgttatcaacttgaaaaagtggcaccgagtcggtgcggcagacttctcttcaggagtcaggtgcac

SEQ ID NO: 19636 - DNA, 125 bp, synthetic construct
  source 1..125: mol_type = other DNA
catggtgcacctgactcctggttttagagctagaaatagcaagttaaaataaggctagtccgttatcaacttgaaaaagtggcaccgagtcggtgcggcagacttctcttcaggagtcaggtgca

SEQ ID NO: 19637 - DNA, 124 bp, synthetic construct
  source 1..124: mol_type = other DNA
catggtgcacctgactcctggttttagagctagaaatagcaagttaaaataaggctagtccgttatcaacttgaaaaagtggcaccgagtcggtgcggcagacttctcttcaggagtcaggtgc

SEQ ID NO: 19638 - DNA, 123 bp, synthetic construct
  source 1..123: mol_type = other DNA
catggtgcacctgactcctggttttagagctagaaatagcaagttaaaataaggctagtccgttatcaacttgaaaaagtggcaccgagtcggtgcggcagacttctcttcaggagtcaggtg

SEQ ID NO: 19639 - DNA, 122 bp, synthetic construct
  source 1..122: mol_type = other DNA
catggtgcacctgactcctggttttagagctagaaatagcaagttaaaataaggctagtccgttatcaacttgaaaaagtggcaccgagtcggtgcggcagacttctcttcaggagtcaggt

SEQ ID NO: 19640 - DNA, 121 bp, synthetic construct
  source 1..121: mol_type = other DNA
catggtgcacctgactcctggttttagagctagaaatagcaagttaaaataaggctagtccgttatcaacttgaaaaagtggcaccgagtcggtgcggcagacttctcttcaggagtcagg

SEQ ID NO: 19641 - DNA, 129 bp, synthetic construct
  source 1..129: mol_type = other DNA
catggtgcacctgactcctggttttagagctagaaatagcaagttaaaataaggctagtccgttatcaacttgaaaaagtggcaccgagtcggtgcgcagacttctcttcaggagtcaggtgcaccatg

SEQ ID NO: 19642 - DNA, 128 bp, synthetic construct
  source 1..128: mol_type = other DNA
catggtgcacctgactcctggttttagagctagaaatagcaagttaaaataaggctagtccgttatcaacttgaaaaagtggcaccgagtcggtgcgcagacttctcttcaggagtcaggtgcaccat

SEQ ID NO: 19643 - DNA, 127 bp, synthetic construct
  source 1..127: mol_type = other DNA
catggtgcacctgactcctggttttagagctagaaatagcaagttaaaataaggctagtccgttatcaacttgaaaaagtggcaccgagtcggtgcgcagacttctcttcaggagtcaggtgcacca

SEQ ID NO: 19644 - DNA, 126 bp, synthetic construct
  source 1..126: mol_type = other DNA
catggtgcacctgactcctggttttagagctagaaatagcaagttaaaataaggctagtccgttatcaacttgaaaaagtggcaccgagtcggtgcgcagacttctcttcaggagtcaggtgcacc

SEQ ID NO: 19645 - DNA, 125 bp, synthetic construct
  source 1..125: mol_type = other DNA
catggtgcacctgactcctggttttagagctagaaatagcaagttaaaataaggctagtccgttatcaacttgaaaaagtggcaccgagtcggtgcgcagacttctcttcaggagtcaggtgcac

SEQ ID NO: 19646 - DNA, 124 bp, synthetic construct
  source 1..124: mol_type = other DNA
catggtgcacctgactcctggttttagagctagaaatagcaagttaaaataaggctagtccgttatcaacttgaaaaagtggcaccgagtcggtgcgcagacttctcttcaggagtcaggtgca

SEQ ID NO: 19647 - DNA, 123 bp, synthetic construct
  source 1..123: mol_type = other DNA
catggtgcacctgactcctggttttagagctagaaatagcaagttaaaataaggctagtccgttatcaacttgaaaaagtggcaccgagtcggtgcgcagacttctcttcaggagtcaggtgc

SEQ ID NO: 19648 - DNA, 122 bp, synthetic construct
  source 1..122: mol_type = other DNA
catggtgcacctgactcctggttttagagctagaaatagcaagttaaaataaggctagtccgttatcaacttgaaaaagtggcaccgagtcggtgcgcagacttctcttcaggagtcaggtg

SEQ ID NO: 19649 - DNA, 121 bp, synthetic construct
  source 1..121: mol_type = other DNA
catggtgcacctgactcctggttttagagctagaaatagcaagttaaaataaggctagtccgttatcaacttgaaaaagtggcaccgagtcggtgcgcagacttctcttcaggagtcaggt

SEQ ID NO: 19650 - DNA, 120 bp, synthetic construct
  source 1..120: mol_type = other DNA
catggtgcacctgactcctggttttagagctagaaatagcaagttaaaataaggctagtccgttatcaacttgaaaaagtggcaccgagtcggtgcgcagacttctcttcaggagtcagg

SEQ ID NO: 19651 - DNA, 127 bp, synthetic construct
  source 1..127: mol_type = other DNA
catggtgcacctgactcctggttttagagctagaaatagcaagttaaaataaggctagtccgttatcaacttgaaaaagtggcaccgagtcggtgcagacttctcttcaggagtcaggtgcaccatg

SEQ ID NO: 19652 - DNA, 126 bp, synthetic construct
  source 1..126: mol_type = other DNA
catggtgcacctgactcctggttttagagctagaaatagcaagttaaaataaggctagtccgttatcaacttgaaaaagtggcaccgagtcggtgcagacttctcttcaggagtcaggtgcaccat

SEQ ID NO: 19653 - DNA, 125 bp, synthetic construct
  source 1..125: mol_type = other DNA
catggtgcacctgactcctggttttagagctagaaatagcaagttaaaataaggctagtccgttatcaacttgaaaaagtggcaccgagtcggtgcagacttctcttcaggagtcaggtgcacca

SEQ ID NO: 19654 - DNA, 124 bp, synthetic construct
  source 1..124: mol_type = other DNA
catggtgcacctgactcctggttttagagctagaaatagcaagttaaaataaggctagtccgttatcaacttgaaaaagtggcaccgagtcggtgcagacttctcttcaggagtcaggtgcacc

SEQ ID NO: 19655 - DNA, 123 bp, synthetic construct
  source 1..123: mol_type = other DNA
catggtgcacctgactcctggttttagagctagaaatagcaagttaaaataaggctagtccgttatcaacttgaaaaagtggcaccgagtcggtgcagacttctcttcaggagtcaggtgcac

SEQ ID NO: 19656 - DNA, 122 bp, synthetic construct
  source 1..122: mol_type = other DNA
catggtgcacctgactcctggttttagagctagaaatagcaagttaaaataaggctagtccgttatcaacttgaaaaagtggcaccgagtcggtgcagacttctcttcaggagtcaggtgca

SEQ ID NO: 19657 - DNA, 121 bp, synthetic construct
  source 1..121: mol_type = other DNA
catggtgcacctgactcctggttttagagctagaaatagcaagttaaaataaggctagtccgttatcaacttgaaaaagtggcaccgagtcggtgcagacttctcttcaggagtcaggtgc

SEQ ID NO: 19658 - DNA, 120 bp, synthetic construct
  source 1..120: mol_type = other DNA
catggtgcacctgactcctggttttagagctagaaatagcaagttaaaataaggctagtccgttatcaacttgaaaaagtggcaccgagtcggtgcagacttctcttcaggagtcaggtg

SEQ ID NO: 19659 - DNA, 119 bp, synthetic construct
  source 1..119: mol_type = other DNA
catggtgcacctgactcctggttttagagctagaaatagcaagttaaaataaggctagtccgttatcaacttgaaaaagtggcaccgagtcggtgcagacttctcttcaggagtcaggt

SEQ ID NO: 19660 - DNA, 118 bp, synthetic construct
  source 1..118: mol_type = other DNA
catggtgcacctgactcctggttttagagctagaaatagcaagttaaaataaggctagtccgttatcaacttgaaaaagtggcaccgagtcggtgcagacttctcttcaggagtcagg

SEQ ID NO: 19661 - DNA, 126 bp, synthetic construct
  source 1..126: mol_type = other DNA
catggtgcacctgactcctggttttagagctagaaatagcaagttaaaataaggctagtccgttatcaacttgaaaaagtggcaccgagtcggtgcgacttctcttcaggagtcaggtgcaccatg

SEQ ID NO: 19662 - DNA, 125 bp, synthetic construct
  source 1..125: mol_type = other DNA
catggtgcacctgactcctggttttagagctagaaatagcaagttaaaataaggctagtccgttatcaacttgaaaaagtggcaccgagtcggtgcgacttctcttcaggagtcaggtgcaccat

SEQ ID NO: 19663 - DNA, 124 bp, synthetic construct
  source 1..124: mol_type = other DNA
catggtgcacctgactcctggttttagagctagaaatagcaagttaaaataaggctagtccgttatcaacttgaaaaagtggcaccgagtcggtgcgacttctcttcaggagtcaggtgcacca

SEQ ID NO: 19664 - DNA, 123 bp, synthetic construct
  source 1..123: mol_type = other DNA
catggtgcacctgactcctggttttagagctagaaatagcaagttaaaataaggctagtccgttatcaacttgaaaaagtggcaccgagtcggtgcgacttctcttcaggagtcaggtgcacc

SEQ ID NO: 19665 - DNA, 122 bp, synthetic construct
  source 1..122: mol_type = other DNA
catggtgcacctgactcctggttttagagctagaaatagcaagttaaaataaggctagtccgttatcaacttgaaaaagtggcaccgagtcggtgcgacttctcttcaggagtcaggtgcac

SEQ ID NO: 19666 - DNA, 121 bp, synthetic construct
  source 1..121: mol_type = other DNA
catggtgcacctgactcctggttttagagctagaaatagcaagttaaaataaggctagtccgttatcaacttgaaaaagtggcaccgagtcggtgcgacttctcttcaggagtcaggtgca

SEQ ID NO: 19667 - DNA, 120 bp, synthetic construct
  source 1..120: mol_type = other DNA
catggtgcacctgactcctggttttagagctagaaatagcaagttaaaataaggctagtccgttatcaacttgaaaaagtggcaccgagtcggtgcgacttctcttcaggagtcaggtgc

SEQ ID NO: 19668 - DNA, 119 bp, synthetic construct
  source 1..119: mol_type = other DNA
catggtgcacctgactcctggttttagagctagaaatagcaagttaaaataaggctagtccgttatcaacttgaaaaagtggcaccgagtcggtgcgacttctcttcaggagtcaggtg

SEQ ID NO: 19669 - DNA, 118 bp, synthetic construct
  source 1..118: mol_type = other DNA
catggtgcacctgactcctggttttagagctagaaatagcaagttaaaataaggctagtccgttatcaacttgaaaaagtggcaccgagtcggtgcgacttctcttcaggagtcaggt

SEQ ID NO: 19670 - DNA, 117 bp, synthetic construct
  source 1..117: mol_type = other DNA
catggtgcacctgactcctggttttagagctagaaatagcaagttaaaataaggctagtccgttatcaacttgaaaaagtggcaccgagtcggtgcgacttctcttcaggagtcagg

SEQ ID NO: 19671 - DNA, 125 bp, synthetic construct
  source 1..125: mol_type = other DNA
catggtgcacctgactcctggttttagagctagaaatagcaagttaaaataaggctagtccgttatcaacttgaaaaagtggcaccgagtcggtgcacttctcttcaggagtcaggtgcaccatg

SEQ ID NO: 19672 - DNA, 124 bp, synthetic construct
  source 1..124: mol_type = other DNA
catggtgcacctgactcctggttttagagctagaaatagcaagttaaaataaggctagtccgttatcaacttgaaaaagtggcaccgagtcggtgcacttctcttcaggagtcaggtgcaccat

SEQ ID NO: 19673 - DNA, 123 bp, synthetic construct
  source 1..123: mol_type = other DNA
catggtgcacctgactcctggttttagagctagaaatagcaagttaaaataaggctagtccgttatcaacttgaaaaagtggcaccgagtcggtgcacttctcttcaggagtcaggtgcacca

SEQ ID NO: 19674 - DNA, 122 bp, synthetic construct
  source 1..122: mol_type = other DNA
catggtgcacctgactcctggttttagagctagaaatagcaagttaaaataaggctagtccgttatcaacttgaaaaagtggcaccgagtcggtgcacttctcttcaggagtcaggtgcacc

SEQ ID NO: 19675 - DNA, 121 bp, synthetic construct
  source 1..121: mol_type = other DNA
catggtgcacctgactcctggttttagagctagaaatagcaagttaaaataaggctagtccgttatcaacttgaaaaagtggcaccgagtcggtgcacttctcttcaggagtcaggtgcac

SEQ ID NO: 19676 - DNA, 120 bp, synthetic construct
  source 1..120: mol_type = other DNA
catggtgcacctgactcctggttttagagctagaaatagcaagttaaaataaggctagtccgttatcaacttgaaaaagtggcaccgagtcggtgcacttctcttcaggagtcaggtgca

SEQ ID NO: 19677 - DNA, 119 bp, synthetic construct
  source 1..119: mol_type = other DNA
catggtgcacctgactcctggttttagagctagaaatagcaagttaaaataaggctagtccgttatcaacttgaaaaagtggcaccgagtcggtgcacttctcttcaggagtcaggtgc

SEQ ID NO: 19678 - DNA, 118 bp, synthetic construct
  source 1..118: mol_type = other DNA
catggtgcacctgactcctggttttagagctagaaatagcaagttaaaataaggctagtccgttatcaacttgaaaaagtggcaccgagtcggtgcacttctcttcaggagtcaggtg

SEQ ID NO: 19679 - DNA, 117 bp, synthetic construct
  source 1..117: mol_type = other DNA
catggtgcacctgactcctggttttagagctagaaatagcaagttaaaataaggctagtccgttatcaacttgaaaaagtggcaccgagtcggtgcacttctcttcaggagtcaggt

SEQ ID NO: 19680 - DNA, 116 bp, synthetic construct
  source 1..116: mol_type = other DNA
catggtgcacctgactcctggttttagagctagaaatagcaagttaaaataaggctagtccgttatcaacttgaaaaagtggcaccgagtcggtgcacttctcttcaggagtcagg

SEQ ID NO: 19681 - DNA, 123 bp, synthetic construct
  source 1..123: mol_type = other DNA
catggtgcacctgactcctggttttagagctagaaatagcaagttaaaataaggctagtccgttatcaacttgaaaaagtggcaccgagtcggtgcttctcttcaggagtcaggtgcaccatg

SEQ ID NO: 19682 - DNA, 122 bp, synthetic construct
  source 1..122: mol_type = other DNA
catggtgcacctgactcctggttttagagctagaaatagcaagttaaaataaggctagtccgttatcaacttgaaaaagtggcaccgagtcggtgcttctcttcaggagtcaggtgcaccat

SEQ ID NO: 19683 - DNA, 121 bp, synthetic construct
  source 1..121: mol_type = other DNA
catggtgcacctgactcctggttttagagctagaaatagcaagttaaaataaggctagtccgttatcaacttgaaaaagtggcaccgagtcggtgcttctcttcaggagtcaggtgcacca

SEQ ID NO: 19684 - DNA, 120 bp, synthetic construct
  source 1..120: mol_type = other DNA
catggtgcacctgactcctggttttagagctagaaatagcaagttaaaataaggctagtccgttatcaacttgaaaaagtggcaccgagtcggtgcttctcttcaggagtcaggtgcacc

SEQ ID NO: 19685 - DNA, 119 bp, synthetic construct
  source 1..119: mol_type = other DNA
catggtgcacctgactcctggttttagagctagaaatagcaagttaaaataaggctagtccgttatcaacttgaaaaagtggcaccgagtcggtgcttctcttcaggagtcaggtgcac

SEQ ID NO: 19686 - DNA, 118 bp, synthetic construct
  source 1..118: mol_type = other DNA
catggtgcacctgactcctggttttagagctagaaatagcaagttaaaataaggctagtccgttatcaacttgaaaaagtggcaccgagtcggtgcttctcttcaggagtcaggtgca

SEQ ID NO: 19687 - DNA, 117 bp, synthetic construct
  source 1..117: mol_type = other DNA
catggtgcacctgactcctggttttagagctagaaatagcaagttaaaataaggctagtccgttatcaacttgaaaaagtggcaccgagtcggtgcttctcttcaggagtcaggtgc

SEQ ID NO: 19688 - DNA, 116 bp, synthetic construct
  source 1..116: mol_type = other DNA
catggtgcacctgactcctggttttagagctagaaatagcaagttaaaataaggctagtccgttatcaacttgaaaaagtggcaccgagtcggtgcttctcttcaggagtcaggtg

SEQ ID NO: 19689 - DNA, 115 bp, synthetic construct
  source 1..115: mol_type = other DNA
catggtgcacctgactcctggttttagagctagaaatagcaagttaaaataaggctagtccgttatcaacttgaaaaagtggcaccgagtcggtgcttctcttcaggagtcaggt

SEQ ID NO: 19690 - DNA, 114 bp, synthetic construct
  source 1..114: mol_type = other DNA
catggtgcacctgactcctggttttagagctagaaatagcaagttaaaataaggctagtccgttatcaacttgaaaaagtggcaccgagtcggtgcttctcttcaggagtcagg

SEQ ID NO: 19691 - DNA, 122 bp, synthetic construct
  source 1..122: mol_type = other DNA
catggtgcacctgactcctggttttagagctagaaatagcaagttaaaataaggctagtccgttatcaacttgaaaaagtggcaccgagtcggtgctctcttcaggagtcaggtgcaccatg

SEQ ID NO: 19692 - DNA, 121 bp, synthetic construct
  source 1..121: mol_type = other DNA
catggtgcacctgactcctggttttagagctagaaatagcaagttaaaataaggctagtccgttatcaacttgaaaaagtggcaccgagtcggtgctctcttcaggagtcaggtgcaccat

SEQ ID NO: 19693 - DNA, 120 bp, synthetic construct
  source 1..120: mol_type = other DNA
catggtgcacctgactcctggttttagagctagaaatagcaagttaaaataaggctagtccgttatcaacttgaaaaagtggcaccgagtcggtgctctcttcaggagtcaggtgcacca

SEQ ID NO: 19694 - DNA, 119 bp, synthetic construct
  source 1..119: mol_type = other DNA
catggtgcacctgactcctggttttagagctagaaatagcaagttaaaataaggctagtccgttatcaacttgaaaaagtggcaccgagtcggtgctctcttcaggagtcaggtgcacc

SEQ ID NO: 19695 - DNA, 118 bp, synthetic construct
  source 1..118: mol_type = other DNA
catggtgcacctgactcctggttttagagctagaaatagcaagttaaaataaggctagtccgttatcaacttgaaaaagtggcaccgagtcggtgctctcttcaggagtcaggtgcac

SEQ ID NO: 19696 - DNA, 117 bp, synthetic construct
  source 1..117: mol_type = other DNA
catggtgcacctgactcctggttttagagctagaaatagcaagttaaaataaggctagtccgttatcaacttgaaaaagtggcaccgagtcggtgctctcttcaggagtcaggtgca

SEQ ID NO: 19697 - DNA, 116 bp, synthetic construct
  source 1..116: mol_type = other DNA
catggtgcacctgactcctggttttagagctagaaatagcaagttaaaataaggctagtccgttatcaacttgaaaaagtggcaccgagtcggtgctctcttcaggagtcaggtgc

SEQ ID NO: 19698 - DNA, 115 bp, synthetic construct
  source 1..115: mol_type = other DNA
catggtgcacctgactcctggttttagagctagaaatagcaagttaaaataaggctagtccgttatcaacttgaaaaagtggcaccgagtcggtgctctcttcaggagtcaggtg

SEQ ID NO: 19699 - DNA, 114 bp, synthetic construct
  source 1..114: mol_type = other DNA
catggtgcacctgactcctggttttagagctagaaatagcaagttaaaataaggctagtccgttatcaacttgaaaaagtggcaccgagtcggtgctctcttcaggagtcaggt

SEQ ID NO: 19700 - DNA, 113 bp, synthetic construct
  source 1..113: mol_type = other DNA
catggtgcacctgactcctggttttagagctagaaatagcaagttaaaataaggctagtccgttatcaacttgaaaaagtggcaccgagtcggtgctctcttcaggagtcagg

SEQ ID NO: 19701 - RNA, 133 nt, synthetic construct
  source 1..133: mol_type = other RNA
  modified_base 1: mod_base = OTHER; note = 2'-O-methyl cytidine phosphorothioate
  modified_base 2: mod_base = OTHER; note = 2'-O-methyl adenosine phosphorothioate
  modified_base 3: mod_base = OTHER; note = 2'-O-methyl uridine phosphorothioate
  modified_base 130: mod_base = OTHER; note = cytidine phosphorothioate
  modified_base 131: mod_base = OTHER; note = 2'-O-methyl adenosine phosphorothioate
  modified_base 132: mod_base = OTHER; note = 2'-O-methyl uridine phosphorothioate
  modified_base 133: mod_base = OTHER; note = 2'-O-methyl guanosine
catggtgcacctgactcctggttttagagctagaaatagcaagttaaaataaggctagtccgttatcaacttgaaaaagtggcaccgagtcggtgcaacggcagacttctcttcaggagtcaggtgcaccatg

SEQ ID NO: 19702 - RNA, 132 nt, synthetic construct
  source 1..132: mol_type = other RNA
  modified_base 1: mod_base = OTHER; note = 2'-O-methyl cytidine phosphorothioate
  modified_base 2: mod_base = OTHER; note = 2'-O-methyl adenosine phosphorothioate
  modified_base 3: mod_base = OTHER; note = 2'-O-methyl uridine phosphorothioate
  modified_base 129: mod_base = OTHER; note = cytidine phosphorothioate
  modified_base 130: mod_base = OTHER; note = 2'-O-methyl cytidine phosphorothioate
  modified_base 131: mod_base = OTHER; note = 2'-O-methyl adenosine phosphorothioate
  modified_base 132: mod_base = OTHER; note = 2'-O-methyl uridine
catggtgcacctgactcctggttttagagctagaaatagcaagttaaaataaggctagtccgttatcaacttgaaaaagtggcaccgagtcggtgcaacggcagacttctcttcaggagtcaggtgcaccat

SEQ ID NO: 19703 - RNA, 131 nt, synthetic construct
  source 1..131: mol_type = other RNA
  modified_base 1: mod_base = OTHER; note = 2'-O-methyl cytidine phosphorothioate
  modified_base 2: mod_base = OTHER; note = 2'-O-methyl adenosine phosphorothioate
  modified_base 3: mod_base = OTHER; note = 2'-O-methyl uridine phosphorothioate
  modified_base 128: mod_base = OTHER; note = adenosine phosphorothioate
  modified_base 129: mod_base = OTHER; note = 2'-O-methyl cytidine phosphorothioate
  modified_base 130: mod_base = OTHER; note = 2'-O-methyl cytidine phosphorothioate
  modified_base 131: mod_base = OTHER; note = 2'-O-methyl adenosine
catggtgcacctgactcctggttttagagctagaaatagcaagttaaaataaggctagtccgttatcaacttgaaaaagtggcaccgagtcggtgcaacggcagacttctcttcaggagtcaggtgcacca

SEQ ID NO: 19704 - RNA, 130 nt, synthetic construct
  source 1..130: mol_type = other RNA
  modified_base 1: mod_base = OTHER; note = 2'-O-methyl cytidine phosphorothioate
  modified_base 2: mod_base = OTHER; note = 2'-O-methyl adenosine phosphorothioate
  modified_base 3: mod_base = OTHER; note = 2'-O-methyl uridine phosphorothioate
  modified_base 127: mod_base = OTHER; note = cytidine phosphorothioate
  modified_base 128: mod_base = OTHER; note = 2'-O-methyl adenosine phosphorothioate
  modified_base 129: mod_base = OTHER; note = 2'-O-methyl cytidine phosphorothioate
  modified_base 130: mod_base = OTHER; note = 2'-O-methyl cytidine
catggtgcacctgactcctggttttagagctagaaatagcaagttaaaataaggctagtccgttatcaacttgaaaaagtggcaccgagtcggtgcaacggcagacttctcttcaggagtcaggtgcacc

SEQ ID NO: 19705 - RNA, 129 nt, synthetic construct
  source 1..129: mol_type = other RNA
  modified_base 1: mod_base = OTHER; note = 2'-O-methyl cytidine phosphorothioate
  modified_base 2: mod_base = OTHER; note = 2'-O-methyl adenosine phosphorothioate
  modified_base 3: mod_base = OTHER; note = 2'-O-methyl uridine phosphorothioate
  modified_base 126: mod_base = OTHER; note = guanosine phosphorothioate
  modified_base 127: mod_base = OTHER; note = 2'-O-methyl cytidine phosphorothioate
  modified_base 128: mod_base = OTHER; note = 2'-O-methyl adenosine phosphorothioate
  modified_base 129: mod_base = OTHER; note = 2'-O-methyl cytidine
catggtgcacctgactcctggttttagagctagaaatagcaagttaaaataaggctagtccgttatcaacttgaaaaagtggcaccgagtcggtgcaacggcagacttctcttcaggagtcaggtgcac

SEQ ID NO: 19706 - RNA, 128 nt, synthetic construct
  source 1..128: mol_type = other RNA
  modified_base 1: mod_base = OTHER; note = 2'-O-methyl cytidine phosphorothioate
  modified_base 2: mod_base = OTHER; note = 2'-O-methyl adenosine phosphorothioate
  modified_base 3: mod_base = OTHER; note = 2'-O-methyl uridine phosphorothioate
  modified_base 125: mod_base = OTHER; note = uridine phosphorothioate
  modified_base 126: mod_base = OTHER; note = 2'-O-methyl guanosine phosphorothioate
  modified_base 127: mod_base = OTHER; note = 2'-O-methyl cytidine phosphorothioate
  modified_base 128: mod_base = OTHER; note = 2'-O-methyl adenosine
catggtgcacctgactcctggttttagagctagaaatagcaagttaaaataaggctagtccgttatcaacttgaaaaagtggcaccgagtcggtgcaacggcagacttctcttcaggagtcaggtgca

SEQ ID NO: 19707 - RNA, 127 nt, synthetic construct
  source 1..127: mol_type = other RNA
  modified_base 1: mod_base = OTHER; note = 2'-O-methyl cytidine phosphorothioate
  modified_base 2: mod_base = OTHER; note = 2'-O-methyl adenosine phosphorothioate
  modified_base 3: mod_base = OTHER; note = 2'-O-methyl uridine phosphorothioate
  modified_base 124: mod_base = OTHER; note = guanosine phosphorothioate
  modified_base 125: mod_base = OTHER; note = 2'-O-methyl uridine phosphorothioate
  modified_base 126: mod_base = OTHER; note = 2'-O-methyl guanosine phosphorothioate
  modified_base 127: mod_base = OTHER; note = 2'-O-methyl cytidine
catggtgcacctgactcctggttttagagctagaaatagcaagttaaaataaggctagtccgttatcaacttgaaaaagtggcaccgagtcggtgcaacggcagacttctcttcaggagtcaggtgc

SEQ ID NO: 19708 - RNA, 126 nt, synthetic construct
  source 1..126: mol_type = other RNA
  modified_base 1: mod_base = OTHER; note = 2'-O-methyl cytidine phosphorothioate
  modified_base 2: mod_base = OTHER; note = 2'-O-methyl adenosine phosphorothioate
  modified_base 3: mod_base = OTHER; note = 2'-O-methyl uridine phosphorothioate
  modified_base 123: mod_base = OTHER; note = guanosine phosphorothioate
  modified_base 124: mod_base = OTHER; note = 2'-O-methyl guanosine phosphorothioate
  modified_base 125: mod_base = OTHER; note = 2'-O-methyl uridine phosphorothioate
  modified_base 126: mod_base = OTHER; note = 2'-O-methyl guanosine
catggtgcacctgactcctggttttagagctagaaatagcaagttaaaataaggctagtccgttatcaacttgaaaaagtggcaccgagtcggtgcaacggcagacttctcttcaggagtcaggtg

SEQ ID NO: 19709 - RNA, 125 nt, synthetic construct
  source 1..125: mol_type = other RNA
  modified_base 1: mod_base = OTHER; note = 2'-O-methyl cytidine phosphorothioate
  modified_base 2: mod_base = OTHER; note = 2'-O-methyl adenosine phosphorothioate
  modified_base 3: mod_base = OTHER; note = 2'-O-methyl uridine phosphorothioate
  modified_base 122: mod_base = OTHER; note = adenosine phosphorothioate
  modified_base 123: mod_base = OTHER; note = 2'-O-methyl guanosine phosphorothioate
  modified_base 124: mod_base = OTHER; note = 2'-O-methyl guanosine phosphorothioate
  modified_base 125: mod_base = OTHER; note = 2'-O-methyl uridine
catggtgcacctgactcctggttttagagctagaaatagcaagttaaaataaggctagtccgttatcaacttgaaaaagtggcaccgagtcggtgcaacggcagacttctcttcaggagtcaggt

SEQ ID NO: 19710 - RNA, 124 nt, synthetic construct
  source 1..124: mol_type = other RNA
  modified_base 1: mod_base = OTHER; note = 2'-O-methyl cytidine phosphorothioate
  modified_base 2: mod_base = OTHER; note = 2'-O-methyl adenosine phosphorothioate
  modified_base 3: mod_base = OTHER; note = 2'-O-methyl uridine phosphorothioate
  modified_base 121: mod_base = OTHER; note = cytidine phosphorothioate
  modified_base 122: mod_base = OTHER; note = 2'-O-methyl adenosine phosphorothioate
  modified_base 123: mod_base = OTHER; note = 2'-O-methyl guanosine phosphorothioate
  modified_base 124: mod_base = OTHER; note = 2'-O-methyl guanosine
catggtgcacctgactcctggttttagagctagaaatagcaagttaaaataaggctagtccgttatcaacttgaaaaagtggcaccgagtcggtgcaacggcagacttctcttcaggagtcagg

SEQ ID NO: 19711 - RNA, 132 nt, synthetic construct
  source 1..132: mol_type = other RNA
  modified_base 1: mod_base = OTHER; note = 2'-O-methyl cytidine phosphorothioate
  modified_base 2: mod_base = OTHER; note = 2'-O-methyl adenosine phosphorothioate
  modified_base 3: mod_base = OTHER; note = 2'-O-methyl uridine phosphorothioate
  modified_base 129: mod_base = OTHER; note = cytidine phosphorothioate
  modified_base 130: mod_base = OTHER; note = 2'-O-methyl adenosine phosphorothioate
  modified_base 131: mod_base = OTHER; note = 2'-O-methyl uridine phosphorothioate
  modified_base 132: mod_base = OTHER; note = 2'-O-methyl guanosine
catggtgcacctgactcctggttttagagctagaaatagcaagttaaaataaggctagtccgttatcaacttgaaaaagtggcaccgagtcggtgcacggcagacttctcttcaggagtcaggtgcaccatg

SEQ ID NO: 19712 - RNA, 131 nt, synthetic construct
  source 1..131: mol_type = other RNA
  modified_base 1: mod_base = OTHER; note = 2'-O-methyl cytidine phosphorothioate
  modified_base 2: mod_base = OTHER; note = 2'-O-methyl adenosine phosphorothioate
  modified_base 3: mod_base = OTHER; note = 2'-O-methyl uridine phosphorothioate
  modified_base 128: mod_base = OTHER; note = cytidine phosphorothioate
  modified_base 129: mod_base = OTHER; note = 2'-O-methyl cytidine phosphorothioate
  modified_base 130: mod_base = OTHER; note = 2'-O-methyl adenosine phosphorothioate
  modified_base 131: mod_base = OTHER; note = 2'-O-methyl uridine
catggtgcacctgactcctggttttagagctagaaatagcaagttaaaataaggctagtccgttatcaacttgaaaaagtggcaccgagtcggtgcacggcagacttctcttcaggagtcaggtgcaccat

SEQ ID NO: 19713 - RNA, 130 nt, synthetic construct
  source 1..130: mol_type = other RNA
  modified_base 1: mod_base = OTHER; note = 2'-O-methyl cytidine phosphorothioate
  modified_base 2: mod_base = OTHER; note = 2'-O-methyl adenosine phosphorothioate
  modified_base 3: mod_base = OTHER; note = 2'-O-methyl uridine phosphorothioate
  modified_base 127: mod_base = OTHER; note = adenosine phosphorothioate
  modified_base 128: mod_base = OTHER; note = 2'-O-methyl cytidine phosphorothioate
  modified_base 129: mod_base = OTHER; note = 2'-O-methyl cytidine phosphorothioate
  modified_base 130: mod_base = OTHER; note = 2'-O-methyl adenosine
catggtgcacctgactcctggttttagagctagaaatagcaagttaaaataaggctagtccgttatcaacttgaaaaagtggcaccgagtcggtgcacggcagacttctcttcaggagtcaggtgcacca

SEQ ID NO: 19714 - RNA, 129 nt, synthetic construct
  source 1..129: mol_type = other RNA
  modified_base 1: mod_base = OTHER; note = 2'-O-methyl cytidine phosphorothioate
  modified_base 2: mod_base = OTHER; note = 2'-O-methyl adenosine phosphorothioate
  modified_base 3: mod_base = OTHER; note = 2'-O-methyl uridine phosphorothioate
  modified_base 126: mod_base = OTHER; note = cytidine phosphorothioate
  modified_base 127: mod_base = OTHER; note = 2'-O-methyl adenosine phosphorothioate
  modified_base 128: mod_base = OTHER; note = 2'-O-methyl cytidine phosphorothioate
  modified_base 129: mod_base = OTHER; note = 2'-O-methyl cytidine
catggtgcacctgactcctggttttagagctagaaatagcaagttaaaataaggctagtccgttatcaacttgaaaaagtggcaccgagtcggtgcacggcagacttctcttcaggagtcaggtgcacc

SEQ ID NO: 19715 - RNA, 128 nt, synthetic construct
  source 1..128: mol_type = other RNA
  modified_base 1: mod_base = OTHER; note = 2'-O-methyl cytidine phosphorothioate
  modified_base 2: mod_base = OTHER; note = 2'-O-methyl adenosine phosphorothioate
  modified_base 3: mod_base = OTHER; note = 2'-O-methyl uridine phosphorothioate
  modified_base 125: mod_base = OTHER; note = guanosine phosphorothioate
  modified_base 126: mod_base = OTHER; note = 2'-O-methyl cytidine phosphorothioate
  modified_base 127: mod_base = OTHER; note = 2'-O-methyl adenosine phosphorothioate
  modified_base 128: mod_base = OTHER; note = 2'-O-methyl cytidine
catggtgcacctgactcctggttttagagctagaaatagcaagttaaaataaggctagtccgttatcaacttgaaaaagtggcaccgagtcggtgcacggcagacttctcttcaggagtcaggtgcac

SEQ ID NO: 19716 - RNA, 127 nt, synthetic construct
  source 1..127: mol_type = other RNA
  modified_base 1: mod_base = OTHER; note = 2'-O-methyl cytidine phosphorothioate
  modified_base 2: mod_base = OTHER; note = 2'-O-methyl adenosine phosphorothioate
  modified_base 3: mod_base = OTHER; note = 2'-O-methyl uridine phosphorothioate
  modified_base 124: mod_base = OTHER; note = uridine phosphorothioate
  modified_base 125: mod_base = OTHER; note = 2'-O-methyl guanosine phosphorothioate
  modified_base 126: mod_base = OTHER; note = 2'-O-methyl cytidine phosphorothioate
  modified_base 127: mod_base = OTHER; note = 2'-O-methyl adenosine
catggtgcacctgactcctggttttagagctagaaatagcaagttaaaataaggctagtccgttatcaacttgaaaaagtggcaccgagtcggtgcacggcagacttctcttcaggagtcaggtgca

SEQ ID NO: 19717 - RNA, 126 nt, synthetic construct
  source 1..126: mol_type = other RNA
  modified_base 1: mod_base = OTHER; note = 2'-O-methyl cytidine phosphorothioate
  modified_base 2: mod_base = OTHER; note = 2'-O-methyl adenosine phosphorothioate
  modified_base 3: mod_base = OTHER; note = 2'-O-methyl uridine phosphorothioate
  modified_base 123: mod_base = OTHER; note = guanosine phosphorothioate
  modified_base 124: mod_base = OTHER; note = 2'-O-methyl uridine phosphorothioate
  modified_base 125: mod_base = OTHER; note = 2'-O-methyl guanosine phosphorothioate
  modified_base 126: mod_base = OTHER; note = 2'-O-methyl cytidine
catggtgcacctgactcctggttttagagctagaaatagcaagttaaaataaggctagtccgttatcaacttgaaaaagtggcaccgagtcggtgcacggcagacttctcttcaggagtcaggtgc

SEQ ID NO: 19718 - RNA, 125 nt, synthetic construct
  source 1..125: mol_type = other RNA
  modified_base 1: mod_base = OTHER; note = 2'-O-methyl cytidine phosphorothioate
  modified_base 2: mod_base = OTHER; note = 2'-O-methyl adenosine phosphorothioate
  modified_base 3: mod_base = OTHER; note = 2'-O-methyl uridine phosphorothioate
  modified_base 122: mod_base = OTHER; note = guanosine phosphorothioate
  modified_base 123: mod_base = OTHER; note = 2'-O-methyl guanosine phosphorothioate
  modified_base 124: mod_base = OTHER; note = 2'-O-methyl uridine phosphorothioate
  modified_base 125: mod_base = OTHER; note = 2'-O-methyl guanosine
catggtgcacctgactcctggttttagagctagaaatagcaagttaaaataaggctagtccgttatcaacttgaaaaagtggcaccgagtcggtgcacggcagacttctcttcaggagtcaggtg

SEQ ID NO: 19719 - RNA, 124 nt, synthetic construct
  source 1..124: mol_type = other RNA
  modified_base 1: mod_base = OTHER; note = 2'-O-methyl cytidine phosphorothioate
  modified_base 2: mod_base = OTHER; note = 2'-O-methyl adenosine phosphorothioate
  modified_base 3: mod_base = OTHER; note = 2'-O-methyl uridine phosphorothioate
  modified_base 121: mod_base = OTHER; note = adenosine phosphorothioate
  modified_base 122: mod_base = OTHER; note = 2'-O-methyl guanosine phosphorothioate
  modified_base 123: mod_base = OTHER; note = 2'-O-methyl guanosine phosphorothioate
  modified_base 124: mod_base = OTHER; note = 2'-O-methyl uridine
catggtgcacctgactcctggttttagagctagaaatagcaagttaaaataaggctagtccgttatcaacttgaaaaagtggcaccgagtcggtgcacggcagacttctcttcaggagtcaggt

SEQ ID NO: 19720 - RNA, 123 nt, synthetic construct
  source 1..123: mol_type = other RNA
  modified_base 1: mod_base = OTHER; note = 2'-O-methyl cytidine phosphorothioate
  modified_base 2: mod_base = OTHER; note = 2'-O-methyl adenosine phosphorothioate
  modified_base 3: mod_base = OTHER; note = 2'-O-methyl uridine phosphorothioate
  modified_base 120: mod_base = OTHER; note = cytidine phosphorothioate
  modified_base 121: mod_base = OTHER; note = 2'-O-methyl adenosine phosphorothioate
  modified_base 122: mod_base = OTHER; note = 2'-O-methyl guanosine phosphorothioate
  modified_base 123: mod_base = OTHER; note = 2'-O-methyl guanosine
catggtgcacctgactcctggttttagagctagaaatagcaagttaaaataaggctagtccgttatcaacttgaaaaagtggcaccgagtcggtgcacggcagacttctcttcaggagtcagg

SEQ ID NO: 19721 - RNA, 130 nt, synthetic construct
  source 1..130: mol_type = other RNA
  modified_base 1: mod_base = OTHER; note = 2'-O-methyl cytidine phosphorothioate
  modified_base 2: mod_base = OTHER; note = 2'-O-methyl adenosine phosphorothioate
  modified_base 3: mod_base = OTHER; note = 2'-O-methyl uridine phosphorothioate
  modified_base 127: mod_base = OTHER; note = cytidine phosphorothioate
  modified_base 128: mod_base = OTHER; note = 2'-O-methyl adenosine phosphorothioate
  modified_base 129: mod_base = OTHER; note = 2'-O-methyl uridine phosphorothioate
  modified_base 130: mod_base = OTHER; note = 2'-O-methyl guanosine
catggtgcacctgactcctggttttagagctagaaatagcaagttaaaataaggctagtccgttatcaacttgaaaaagtggcaccgagtcggtgcggcagacttctcttcaggagtcaggtgcaccatg

SEQ ID NO: 19722 - RNA, 129 nt, synthetic construct
  source 1..129: mol_type = other RNA
  modified_base 1: mod_base = OTHER; note = 2'-O-methyl cytidine phosphorothioate
  modified_base 2: mod_base = OTHER; note = 2'-O-methyl adenosine phosphorothioate
  modified_base 3: mod_base = OTHER; note = 2'-O-methyl uridine phosphorothioate
  modified_base 126: mod_base = OTHER; note = cytidine phosphorothioate
  modified_base 127: mod_base = OTHER; note = 2'-O-methyl cytidine phosphorothioate
  modified_base 128: mod_base = OTHER; note = 2'-O-methyl adenosine phosphorothioate
  modified_base 129: mod_base = OTHER; note = 2'-O-methyl uridine
catggtgcacctgactcctggttttagagctagaaatagcaagttaaaataaggctagtccgttatcaacttgaaaaagtggcaccgagtcggtgcggcagacttctcttcaggagtcaggtgcaccat

SEQ ID NO: 19723 - RNA, 128 nt, synthetic construct
  source 1..128: mol_type = other RNA
  modified_base 1: mod_base = OTHER; note = 2'-O-methyl cytidine phosphorothioate
  modified_base 2: mod_base = OTHER; note = 2'-O-methyl adenosine phosphorothioate
  modified_base 3: mod_base = OTHER; note = 2'-O-methyl uridine phosphorothioate
  modified_base 125: mod_base = OTHER; note = adenosine phosphorothioate
  modified_base 126: mod_base = OTHER; note = 2'-O-methyl cytidine phosphorothioate
  modified_base 127: mod_base = OTHER; note = 2'-O-methyl cytidine phosphorothioate
  modified_base 128: mod_base = OTHER; note = 2'-O-methyl adenosine
catggtgcacctgactcctggttttagagctagaaatagcaagttaaaataaggctagtccgttatcaacttgaaaaagtggcaccgagtcggtgcggcagacttctcttcaggagtcaggtgcacca

SEQ ID NO: 19724 - RNA, 127 nt, synthetic construct
  source 1..127: mol_type = other RNA
  modified_base 1: mod_base = OTHER; note = 2'-O-methyl cytidine phosphorothioate
  modified_base 2: mod_base = OTHER; note = 2'-O-methyl adenosine phosphorothioate
  modified_base 3: mod_base = OTHER; note = 2'-O-methyl uridine phosphorothioate
  modified_base 124: mod_base = OTHER; note = cytidine phosphorothioate
  modified_base 125: mod_base = OTHER; note = 2'-O-methyl adenosine phosphorothioate
  modified_base 126: mod_base = OTHER; note = 2'-O-methyl cytidine phosphorothioate
  modified_base 127: mod_base = OTHER; note = 2'-O-methyl cytidine
catggtgcacctgactcctggttttagagctagaaatagcaagttaaaataaggctagtccgttatcaacttgaaaaagtggcaccgagtcggtgcggcagacttctcttcaggagtcaggtgcacc

SEQ ID NO: 19725 - RNA, 126 nt, synthetic construct
  source 1..126: mol_type = other RNA
  modified_base 1: mod_base = OTHER; note = 2'-O-methyl cytidine phosphorothioate
  modified_base 2: mod_base = OTHER; note = 2'-O-methyl adenosine phosphorothioate
  modified_base 3: mod_base = OTHER; note = 2'-O-methyl uridine phosphorothioate
  modified_base 123: mod_base = OTHER; note = guanosine phosphorothioate
  modified_base 124: mod_base = OTHER; note = 2'-O-methyl cytidine phosphorothioate
  modified_base 125: mod_base = OTHER; note = 2'-O-methyl adenosine phosphorothioate
  modified_base 126: mod_base = OTHER; note = 2'-O-methyl cytidine
catggtgcacctgactcctggttttagagctagaaatagcaagttaaaataaggctagtccgttatcaacttgaaaaagtggcaccgagtcggtgcggcagacttctcttcaggagtcaggtgcac

SEQ ID NO: 19726 - RNA, 125 nt, synthetic construct
  source 1..125: mol_type = other RNA
  modified_base 1: mod_base = OTHER; note = 2'-O-methyl cytidine phosphorothioate
  modified_base 2: mod_base = OTHER; note = 2'-O-methyl adenosine phosphorothioate
  modified_base 3: mod_base = OTHER; note = 2'-O-methyl uridine phosphorothioate
  modified_base 122: mod_base = OTHER; note = uridine phosphorothioate
  modified_base 123: mod_base = OTHER; note = 2'-O-methyl guanosine phosphorothioate
  modified_base 124: mod_base = OTHER; note = 2'-O-methyl cytidine phosphorothioate
  modified_base 125: mod_base = OTHER; note = 2'-O-methyl adenosine
catggtgcacctgactcctggttttagagctagaaatagcaagttaaaataaggctagtccgttatcaacttgaaaaagtggcaccgagtcggtgcggcagacttctcttcaggagtcaggtgca

SEQ ID NO: 19727 - RNA, 124 nt, synthetic construct
  source 1..124: mol_type = other RNA
  modified_base 1: mod_base = OTHER; note = 2'-O-methyl cytidine phosphorothioate
  modified_base 2: mod_base = OTHER; note = 2'-O-methyl adenosine phosphorothioate
  modified_base 3: mod_base = OTHER; note = 2'-O-methyl uridine phosphorothioate
  modified_base 121: mod_base = OTHER; note = guanosine phosphorothioate
  modified_base 122: mod_base = OTHER; note = 2'-O-methyl uridine phosphorothioate
  modified_base 123: mod_base = OTHER; note = 2'-O-methyl guanosine phosphorothioate
  modified_base 124: mod_base = OTHER; note = 2'-O-methyl cytidine
catggtgcacctgactcctggttttagagctagaaatagcaagttaaaataaggctagtccgttatcaacttgaaaaagtggcaccgagtcggtgcggcagacttctcttcaggagtcaggtgc

SEQ ID NO: 19728 - RNA, 123 nt, synthetic construct
  source 1..123: mol_type = other RNA
  modified_base 1: mod_base = OTHER; note = 2'-O-methyl cytidine phosphorothioate
  modified_base 2: mod_base = OTHER; note = 2'-O-methyl adenosine phosphorothioate
  modified_base 3: mod_base = OTHER; note = 2'-O-methyl uridine phosphorothioate
  modified_base 120: mod_base = OTHER; note = guanosine phosphorothioate
  modified_base 121: mod_base = OTHER; note = 2'-O-methyl guanosine phosphorothioate
  modified_base 122: mod_base = OTHER; note = 2'-O-methyl uridine phosphorothioate
  modified_base 123: mod_base = OTHER; note = 2'-O-methyl guanosine
catggtgcacctgactcctggttttagagctagaaatagcaagttaaaataaggctagtccgttatcaacttgaaaaagtggcaccgagtcggtgcggcagacttctcttcaggagtcaggtg

SEQ ID NO: 19729 - RNA, 122 nt, synthetic construct
  source 1..122: mol_type = other RNA
  modified_base 1: mod_base = OTHER; note = 2'-O-methyl cytidine phosphorothioate
  modified_base 2: mod_base = OTHER; note = 2'-O-methyl adenosine phosphorothioate
  modified_base 3: mod_base = OTHER; note = 2'-O-methyl uridine phosphorothioate
  modified_base 119: mod_base = OTHER; note = adenosine phosphorothioate
  modified_base 120: mod_base = OTHER; note = 2'-O-methyl guanosine phosphorothioate
  modified_base 121: mod_base = OTHER; note = 2'-O-methyl guanosine phosphorothioate
  modified_base 122: mod_base = OTHER; note = 2'-O-methyl uridine
catggtgcacctgactcctggttttagagctagaaatagcaagttaaaataaggctagtccgttatcaacttgaaaaagtggcaccgagtcggtgcggcagacttctcttcaggagtcaggt

SEQ ID NO: 19730 - RNA, 121 nt, synthetic construct
  source 1..121: mol_type = other RNA
  modified_base 1: mod_base = OTHER; note = 2'-O-methyl cytidine phosphorothioate
  modified_base 2: mod_base = OTHER; note = 2'-O-methyl adenosine phosphorothioate
  modified_base 3: mod_base = OTHER; note = 2'-O-methyl uridine phosphorothioate
  modified_base 118: mod_base = OTHER; note = cytidine phosphorothioate
  modified_base 119: mod_base = OTHER; note = 2'-O-methyl adenosine phosphorothioate
  modified_base 120: mod_base = OTHER; note = 2'-O-methyl guanosine phosphorothioate
  modified_base 121: mod_base = OTHER; note = 2'-O-methyl guanosine
catggtgcacctgactcctggttttagagctagaaatagcaagttaaaataaggctagtccgttatcaacttgaaaaagtggcaccgagtcggtgcggcagacttctcttcaggagtcagg

SEQ ID NO: 19731 - RNA, 129 nt, synthetic construct
  source 1..129: mol_type = other RNA
  modified_base 1: mod_base = OTHER; note = 2'-O-methyl cytidine phosphorothioate
  modified_base 2: mod_base = OTHER; note = 2'-O-methyl adenosine phosphorothioate
  modified_base 3: mod_base = OTHER; note = 2'-O-methyl uridine phosphorothioate
  modified_base 126: mod_base = OTHER; note = cytidine phosphorothioate
  modified_base 127: mod_base = OTHER; note = 2'-O-methyl adenosine phosphorothioate
  modified_base 128: mod_base = OTHER; note = 2'-O-methyl uridine phosphorothioate
  modified_base 129: mod_base = OTHER; note = 2'-O-methyl guanosine
catggtgcacctgactcctggttttagagctagaaatagcaagttaaaataaggctagtccgttatcaacttgaaaaagtggcaccgagtcggtgcgcagacttctcttcaggagtcaggtgcaccatg

SEQ ID NO: 19732 - RNA, 128 nt, synthetic construct
  source 1..128: mol_type = other RNA
  modified_base 1: mod_base = OTHER; note = 2'-O-methyl cytidine phosphorothioate
  modified_base 2: mod_base = OTHER; note = 2'-O-methyl adenosine phosphorothioate
  modified_base 3: mod_base = OTHER; note = 2'-O-methyl uridine phosphorothioate
  modified_base 125: mod_base = OTHER; note = cytidine phosphorothioate
  modified_base 126: mod_base = OTHER; note = 2'-O-methyl cytidine phosphorothioate
  modified_base 127: mod_base = OTHER; note = 2'-O-methyl adenosine phosphorothioate
  modified_base 128: mod_base = OTHER; note = 2'-O-methyl uridine
catggtgcacctgactcctggttttagagctagaaatagcaagttaaaataaggctagtccgttatcaacttgaaaaagtggcaccgagtcggtgcgcagacttctcttcaggagtcaggtgcaccat

SEQ ID NO: 19733 - RNA, 127 nt, synthetic construct
  source 1..127: mol_type = other RNA
  modified_base 1: mod_base = OTHER; note = 2'-O-methyl cytidine phosphorothioate
  modified_base 2: mod_base = OTHER; note = 2'-O-methyl adenosine phosphorothioate
  modified_base 3: mod_base = OTHER; note = 2'-O-methyl uridine phosphorothioate
  modified_base 124: mod_base = OTHER; note = adenosine phosphorothioate
  modified_base 125: mod_base = OTHER; note = 2'-O-methyl cytidine phosphorothioate
  modified_base 126: mod_base = OTHER; note = 2'-O-methyl cytidine phosphorothioate
  modified_base 127: mod_base = OTHER; note = 2'-O-methyl adenosine
catggtgcacctgactcctggttttagagctagaaatagcaagttaaaataaggctagtccgttatcaacttgaaaaagtggcaccgagtcggtgcgcagacttctcttcaggagtcaggtgcacca

SEQ ID NO: 19734 - RNA, 126 nt, synthetic construct
  source 1..126: mol_type = other RNA
  modified_base 1: mod_base = OTHER; note = 2'-O-methyl cytidine phosphorothioate
  modified_base 2: mod_base = OTHER; note = 2'-O-methyl adenosine phosphorothioate
  modified_base 3: mod_base = OTHER; note = 2'-O-methyl uridine phosphorothioate
  modified_base 123: mod_base = OTHER; note = cytidine phosphorothioate
  modified_base 124: mod_base = OTHER; note = 2'-O-methyl adenosine phosphorothioate
  modified_base 125: mod_base = OTHER; note = 2'-O-methyl cytidine phosphorothioate
  modified_base 126: mod_base = OTHER; note = 2'-O-methyl cytidine
catggtgcacctgactcctggttttagagctagaaatagcaagttaaaataaggctagtccgttatcaacttgaaaaagtggcaccgagtcggtgcgcagacttctcttcaggagtcaggtgcacc

SEQ ID NO: 19735 - RNA, 125 nt, synthetic construct
  source 1..125: mol_type = other RNA
  modified_base 1: mod_base = OTHER; note = 2'-O-methyl cytidine phosphorothioate
  modified_base 2: mod_base = OTHER; note = 2'-O-methyl adenosine phosphorothioate
  modified_base 3: mod_base = OTHER; note = 2'-O-methyl uridine phosphorothioate
  modified_base 122: mod_base = OTHER; note = guanosine phosphorothioate
  modified_base 123: mod_base = OTHER; note = 2'-O-methyl cytidine phosphorothioate
  modified_base 124: mod_base = OTHER; note = 2'-O-methyl adenosine phosphorothioate
  modified_base 125: mod_base = OTHER; note = 2'-O-methyl cytidine
catggtgcacctgactcctggttttagagctagaaatagcaagttaaaataaggctagtccgttatcaacttgaaaaagtggcaccgagtcggtgcgcagacttctcttcaggagtcaggtgcac

SEQ ID NO: 19736 - RNA, 124 nt, synthetic construct
  source 1..124: mol_type = other RNA
  modified_base 1: mod_base = OTHER; note = 2'-O-methyl cytidine phosphorothioate
  modified_base 2: mod_base = OTHER; note = 2'-O-methyl adenosine phosphorothioate
  modified_base 3: mod_base = OTHER; note = 2'-O-methyl uridine phosphorothioate
  modified_base 121: mod_base = OTHER; note = uridine phosphorothioate
  modified_base 122: mod_base = OTHER; note = 2'-O-methyl guanosine phosphorothioate
  modified_base 123: mod_base = OTHER; note = 2'-O-methyl cytidine phosphorothioate
  modified_base 124: mod_base = OTHER; note = 2'-O-methyl adenosine
catggtgcacctgactcctggttttagagctagaaatagcaagttaaaataaggctagtccgttatcaacttgaaaaagtggcaccgagtcggtgcgcagacttctcttcaggagtcaggtgca

SEQ ID NO: 19737 - RNA, 123 nt, synthetic construct
  source 1..123: mol_type = other RNA
  modified_base 1: mod_base = OTHER; note = 2'-O-methyl cytidine phosphorothioate
  modified_base 2: mod_base = OTHER; note = 2'-O-methyl adenosine phosphorothioate
  modified_base 3: mod_base = OTHER; note = 2'-O-methyl uridine phosphorothioate
  modified_base 120: mod_base = OTHER; note = guanosine phosphorothioate
  modified_base 121: mod_base = OTHER; note = 2'-O-methyl uridine phosphorothioate
  modified_base 122: mod_base = OTHER; note = 2'-O-methyl guanosine phosphorothioate
  modified_base 123: mod_base = OTHER; note = 2'-O-methyl cytidine
catggtgcacctgactcctggttttagagctagaaatagcaagttaaaataaggctagtccgttatcaacttgaaaaagtggcaccgagtcggtgcgcagacttctcttcaggagtcaggtgc

SEQ ID NO: 19738 - RNA, 122 nt, synthetic construct
  source 1..122: mol_type = other RNA
  modified_base 1: mod_base = OTHER; note = 2'-O-methyl cytidine phosphorothioate
  modified_base 2: mod_base = OTHER; note = 2'-O-methyl adenosine phosphorothioate
  modified_base 3: mod_base = OTHER; note = 2'-O-methyl uridine phosphorothioate
  modified_base 119: mod_base = OTHER; note = guanosine phosphorothioate
  modified_base 120: mod_base = OTHER; note = 2'-O-methyl guanosine phosphorothioate
  modified_base 121: mod_base = OTHER; note = 2'-O-methyl uridine phosphorothioate
  modified_base 122: mod_base = OTHER; note = 2'-O-methyl guanosine
catggtgcacctgactcctggttttagagctagaaatagcaagttaaaataaggctagtccgttatcaacttgaaaaagtggcaccgagtcggtgcgcagacttctcttcaggagtcaggtg

SEQ ID NO: 19739 - RNA, 121 nt, synthetic construct
  source 1..121: mol_type = other RNA
  modified_base 1: mod_base = OTHER; note = 2'-O-methyl cytidine phosphorothioate
  modified_base 2: mod_base = OTHER; note = 2'-O-methyl adenosine phosphorothioate
  modified_base 3: mod_base = OTHER; note = 2'-O-methyl uridine phosphorothioate
  modified_base 118: mod_base = OTHER; note = adenosine phosphorothioate
  modified_base 119: mod_base = OTHER; note = 2'-O-methyl guanosine phosphorothioate
  modified_base 120: mod_base = OTHER; note = 2'-O-methyl guanosine phosphorothioate
  modified_base 121: mod_base = OTHER; note = 2'-O-methyl uridine
catggtgcacctgactcctggttttagagctagaaatagcaagttaaaataaggctagtccgttatcaacttgaaaaagtggcaccgagtcggtgcgcagacttctcttcaggagtcaggt

SEQ ID NO: 19740 - RNA, 120 nt, synthetic construct
  source 1..120: mol_type = other RNA
  modified_base 1: mod_base = OTHER; note = 2'-O-methyl cytidine phosphorothioate
  modified_base 2: mod_base = OTHER; note = 2'-O-methyl adenosine phosphorothioate
  modified_base 3: mod_base = OTHER; note = 2'-O-methyl uridine phosphorothioate
  modified_base 117: mod_base = OTHER; note = cytidine phosphorothioate
  modified_base 118: mod_base = OTHER; note = 2'-O-methyl adenosine phosphorothioate
  modified_base 119: mod_base = OTHER; note = 2'-O-methyl guanosine phosphorothioate
  modified_base 120: mod_base = OTHER; note = 2'-O-methyl guanosine
catggtgcacctgactcctggttttagagctagaaatagcaagttaaaataaggctagtccgttatcaacttgaaaaagtggcaccgagtcggtgcgcagacttctcttcaggagtcagg

SEQ ID NO: 19741 - RNA, 127 nt, synthetic construct
  source 1..127: mol_type = other RNA
  modified_base 1: mod_base = OTHER; note = 2'-O-methyl cytidine phosphorothioate
  modified_base 2: mod_base = OTHER; note = 2'-O-methyl adenosine phosphorothioate
  modified_base 3: mod_base = OTHER; note = 2'-O-methyl uridine phosphorothioate
  modified_base 124: mod_base = OTHER; note = cytidine phosphorothioate
  modified_base 125: mod_base = OTHER; note = 2'-O-methyl adenosine phosphorothioate
  modified_base 126: mod_base = OTHER; note = 2'-O-methyl uridine phosphorothioate
  modified_base 127: mod_base = OTHER; note = 2'-O-methyl guanosine
catggtgcacctgactcctggttttagagctagaaatagcaagttaaaataaggctagtccgttatcaacttgaaaaagtggcaccgagtcggtgcagacttctcttcaggagtcaggtgcaccatg

SEQ ID NO: 19742 - RNA, 126 nt, synthetic construct
  source 1..126: mol_type = other RNA
  modified_base 1: mod_base = OTHER; note = 2'-O-methyl cytidine phosphorothioate
  modified_base 2: mod_base = OTHER; note = 2'-O-methyl adenosine phosphorothioate
  modified_base 3: mod_base = OTHER; note = 2'-O-methyl uridine phosphorothioate
  modified_base 123: mod_base = OTHER; note = cytidine phosphorothioate
  modified_base 124: mod_base = OTHER; note = 2'-O-methyl cytidine phosphorothioate
  modified_base 125: mod_base = OTHER; note = 2'-O-methyl adenosine phosphorothioate
  modified_base 126: mod_base = OTHER; note = 2'-O-methyl uridine
catggtgcacctgactcctggttttagagctagaaatagcaagttaaaataaggctagtccgttatcaacttgaaaaagtggcaccgagtcggtgcagacttctcttcaggagtcaggtgcaccat

SEQ ID NO: 19743 - RNA, 125 nt, synthetic construct
  source 1..125: mol_type = other RNA
  modified_base 1: mod_base = OTHER; note = 2'-O-methyl cytidine phosphorothioate
  modified_base 2: mod_base = OTHER; note = 2'-O-methyl adenosine phosphorothioate
  modified_base 3: mod_base = OTHER; note = 2'-O-methyl uridine phosphorothioate
  modified_base 122: mod_base = OTHER; note = adenosine phosphorothioate
  modified_base 123: mod_base = OTHER; note = 2'-O-methyl cytidine phosphorothioate
  modified_base 124: mod_base = OTHER; note = 2'-O-methyl cytidine phosphorothioate
  modified_base 125: mod_base = OTHER; note = 2'-O-methyl adenosine
catggtgcacctgactcctggttttagagctagaaatagcaagttaaaataaggctagtccgttatcaacttgaaaaagtggcaccgagtcggtgcagacttctcttcaggagtcaggtgcacca

SEQ ID NO: 19744 - RNA, 124 nt, synthetic construct
  source 1..124: mol_type = other RNA
  modified_base 1: mod_base = OTHER; note = 2'-O-methyl cytidine phosphorothioate
  modified_base 2: mod_base = OTHER; note = 2'-O-methyl adenosine phosphorothioate
  modified_base 3: mod_base = OTHER; note = 2'-O-methyl uridine phosphorothioate
  modified_base 121: mod_base = OTHER; note = cytidine phosphorothioate
  modified_base 122: mod_base = OTHER; note = 2'-O-methyl adenosine phosphorothioate
  modified_base 123: mod_base = OTHER; note = 2'-O-methyl cytidine phosphorothioate
  modified_base 124: mod_base = OTHER; note = 2'-O-methyl cytidine
catggtgcacctgactcctggttttagagctagaaatagcaagttaaaataaggctagtccgttatcaacttgaaaaagtggcaccgagtcggtgcagacttctcttcaggagtcaggtgcacc

SEQ ID NO: 19745 - RNA, 123 nt, synthetic construct
  source 1..123: mol_type = other RNA
  modified_base 1: mod_base = OTHER; note = 2'-O-methyl cytidine phosphorothioate
  modified_base 2: mod_base = OTHER; note = 2'-O-methyl adenosine phosphorothioate
  modified_base 3: mod_base = OTHER; note = 2'-O-methyl uridine phosphorothioate
  modified_base 120: mod_base = OTHER; note = guanosine phosphorothioate
  modified_base 121: mod_base = OTHER; note = 2'-O-methyl cytidine phosphorothioate
  modified_base 122: mod_base = OTHER; note = 2'-O-methyl adenosine phosphorothioate
  modified_base 123: mod_base = OTHER; note = 2'-O-methyl cytidine
catggtgcacctgactcctggttttagagctagaaatagcaagttaaaataaggctagtccgttatcaacttgaaaaagtggcaccgagtcggtgcagacttctcttcaggagtcaggtgcac

SEQ ID NO: 19746 - RNA, 122 nt, synthetic construct
  source 1..122: mol_type = other RNA
  modified_base 1: mod_base = OTHER; note = 2'-O-methyl cytidine phosphorothioate
  modified_base 2: mod_base = OTHER; note = 2'-O-methyl adenosine phosphorothioate
  modified_base 3: mod_base = OTHER; note = 2'-O-methyl uridine phosphorothioate
  modified_base 119: mod_base = OTHER; note = uridine phosphorothioate
  modified_base 120: mod_base = OTHER; note = 2'-O-methyl guanosine phosphorothioate
  modified_base 121: mod_base = OTHER; note = 2'-O-methyl cytidine phosphorothioate
  modified_base 122: mod_base = OTHER; note = 2'-O-methyl adenosine
catggtgcacctgactcctggttttagagctagaaatagcaagttaaaataaggctagtccgttatcaacttgaaaaagtggcaccgagtcggtgcagacttctcttcaggagtcaggtgca

SEQ ID NO: 19747 - RNA, 121 nt, synthetic construct
  source 1..121: mol_type = other RNA
  modified_base 1: mod_base = OTHER; note = 2'-O-methyl cytidine phosphorothioate
  modified_base 2: mod_base = OTHER; note = 2'-O-methyl adenosine phosphorothioate
  modified_base 3: mod_base = OTHER; note = 2'-O-methyl uridine phosphorothioate
  modified_base 118: mod_base = OTHER; note = guanosine phosphorothioate
  modified_base 119: mod_base = OTHER; note = 2'-O-methyl uridine phosphorothioate
  modified_base 120: mod_base = OTHER; note = 2'-O-methyl guanosine phosphorothioate
  modified_base 121: mod_base = OTHER; note = 2'-O-methyl cytidine
catggtgcacctgactcctggttttagagctagaaatagcaagttaaaataaggctagtccgttatcaacttgaaaaagtggcaccgagtcggtgcagacttctcttcaggagtcaggtgc

SEQ ID NO: 19748 - RNA, 120 nt, synthetic construct
  source 1..120: mol_type = other RNA
  modified_base 1: mod_base = OTHER; note = 2'-O-methyl cytidine phosphorothioate
  modified_base 2: mod_base = OTHER; note = 2'-O-methyl adenosine phosphorothioate
  modified_base 3: mod_base = OTHER; note = 2'-O-methyl uridine phosphorothioate
  modified_base 117: mod_base = OTHER; note = guanosine phosphorothioate
  modified_base 118: mod_base = OTHER; note = 2'-O-methyl guanosine phosphorothioate
  modified_base 119: mod_base = OTHER; note = 2'-O-methyl uridine phosphorothioate
  modified_base 120: mod_base = OTHER; note = 2'-O-methyl guanosine
catggtgcacctgactcctggttttagagctagaaatagcaagttaaaataaggctagtccgttatcaacttgaaaaagtggcaccgagtcggtgcagacttctcttcaggagtcaggtg

SEQ ID NO: 19749 - RNA, 119 nt, synthetic construct
  source 1..119: mol_type = other RNA
  modified_base 1: mod_base = OTHER; note = 2'-O-methyl cytidine phosphorothioate
  modified_base 2: mod_base = OTHER; note = 2'-O-methyl adenosine phosphorothioate
  modified_base 3: mod_base = OTHER; note = 2'-O-methyl uridine phosphorothioate
  modified_base 116: mod_base = OTHER; note = adenosine phosphorothioate
  modified_base 117: mod_base = OTHER; note = 2'-O-methyl guanosine phosphorothioate
  modified_base 118: mod_base = OTHER; note = 2'-O-methyl guanosine phosphorothioate
  modified_base 119: mod_base = OTHER; note = 2'-O-methyl uridine
catggtgcacctgactcctggttttagagctagaaatagcaagttaaaataaggctagtccgttatcaacttgaaaaagtggcaccgagtcggtgcagacttctcttcaggagtcaggt

SEQ ID NO: 19750 - RNA, 118 nt, synthetic construct
  source 1..118: mol_type = other RNA
  modified_base 1: mod_base = OTHER; note = 2'-O-methyl cytidine phosphorothioate
  modified_base 2: mod_base = OTHER; note = 2'-O-methyl adenosine phosphorothioate
  modified_base 3: mod_base = OTHER; note = 2'-O-methyl uridine phosphorothioate
  modified_base 115: mod_base = OTHER; note = cytidine phosphorothioate
  modified_base 116: mod_base = OTHER; note = 2'-O-methyl adenosine phosphorothioate
  modified_base 117: mod_base = OTHER; note = 2'-O-methyl guanosine phosphorothioate
  modified_base 118: mod_base = OTHER; note = 2'-O-methyl guanosine
catggtgcacctgactcctggttttagagctagaaatagcaagttaaaataaggctagtccgttatcaacttgaaaaagtggcaccgagtcggtgcagacttctcttcaggagtcagg

SEQ ID NO: 19751 - RNA, 126 nt, synthetic construct
  source 1..126: mol_type = other RNA
  modified_base 1: mod_base = OTHER; note = 2'-O-methyl cytidine phosphorothioate
  modified_base 2: mod_base = OTHER; note = 2'-O-methyl adenosine phosphorothioate
  modified_base 3: mod_base = OTHER; note = 2'-O-methyl uridine phosphorothioate
  modified_base 123: mod_base = OTHER; note = cytidine phosphorothioate
  modified_base 124: mod_base = OTHER; note = 2'-O-methyl adenosine phosphorothioate
  modified_base 125: mod_base = OTHER; note = 2'-O-methyl uridine phosphorothioate
  modified_base 126: mod_base = OTHER; note = 2'-O-methyl guanosine
catggtgcacctgactcctggttttagagctagaaatagcaagttaaaataaggctagtccgttatcaacttgaaaaagtggcaccgagtcggtgcgacttctcttcaggagtcaggtgcaccatg

SEQ ID NO: 19752 - RNA, 125 nt, synthetic construct
  source 1..125: mol_type = other RNA
  modified_base 1: mod_base = OTHER; note = 2'-O-methyl cytidine phosphorothioate
  modified_base 2: mod_base = OTHER; note = 2'-O-methyl adenosine phosphorothioate
  modified_base 3: mod_base = OTHER; note = 2'-O-methyl uridine phosphorothioate
  modified_base 122: mod_base = OTHER; note = cytidine phosphorothioate
  modified_base 123: mod_base = OTHER; note = 2'-O-methyl cytidine phosphorothioate
  modified_base 124: mod_base = OTHER; note = 2'-O-methyl adenosine phosphorothioate
  modified_base 125: mod_base = OTHER; note = 2'-O-methyl uridine
catggtgcacctgactcctggttttagagctagaaatagcaagttaaaataaggctagtccgttatcaacttgaaaaagtggcaccgagtcggtgcgacttctcttcaggagtcaggtgcaccat

SEQ ID NO: 19753 - RNA, 124 nt, synthetic construct
  source 1..124: mol_type = other RNA
  modified_base 1: mod_base = OTHER; note = 2'-O-methyl cytidine phosphorothioate
  modified_base 2: mod_base = OTHER; note = 2'-O-methyl adenosine phosphorothioate
  modified_base 3: mod_base = OTHER; note = 2'-O-methyl uridine phosphorothioate
  modified_base 121: mod_base = OTHER; note = adenosine phosphorothioate
  modified_base 122: mod_base = OTHER; note = 2'-O-methyl cytidine phosphorothioate
  modified_base 123: mod_base = OTHER; note = 2'-O-methyl cytidine phosphorothioate
  modified_base 124: mod_base = OTHER; note = 2'-O-methyl adenosine
catggtgcacctgactcctggttttagagctagaaatagcaagttaaaataaggctagtccgttatcaacttgaaaaagtggcaccgagtcggtgcgacttctcttcaggagtcaggtgcacca

SEQ ID NO: 19754 - RNA, 123 nt, synthetic construct
  source 1..123: mol_type = other RNA
  modified_base 1: mod_base = OTHER; note = 2'-O-methyl cytidine phosphorothioate
  modified_base 2: mod_base = OTHER; note = 2'-O-methyl adenosine phosphorothioate
  modified_base 3: mod_base = OTHER; note = 2'-O-methyl uridine phosphorothioate
  modified_base 120: mod_base = OTHER; note = cytidine phosphorothioate
  modified_base 121: mod_base = OTHER; note = 2'-O-methyl adenosine phosphorothioate
  modified_base 122: mod_base = OTHER; note = 2'-O-methyl cytidine phosphorothioate
  modified_base 123: mod_base = OTHER; note = 2'-O-methyl cytidine
catggtgcacctgactcctggttttagagctagaaatagcaagttaaaataaggctagtccgttatcaacttgaaaaagtggcaccgagtcggtgcgacttctcttcaggagtcaggtgcacc

SEQ ID NO: 19755 - RNA, 122 nt, synthetic construct
  source 1..122: mol_type = other RNA
  modified_base 1: mod_base = OTHER; note = 2'-O-methyl cytidine phosphorothioate
  modified_base 2: mod_base = OTHER; note = 2'-O-methyl adenosine phosphorothioate
  modified_base 3: mod_base = OTHER; note = 2'-O-methyl uridine phosphorothioate
  modified_base 119: mod_base = OTHER; note = guanosine phosphorothioate
  modified_base 120: mod_base = OTHER; note = 2'-O-methyl cytidine phosphorothioate
  modified_base 121: mod_base = OTHER; note = 2'-O-methyl adenosine phosphorothioate
  modified_base 122: mod_base = OTHER; note = 2'-O-methyl cytidine
catggtgcacctgactcctggttttagagctagaaatagcaagttaaaataaggctagtccgttatcaacttgaaaaagtggcaccgagtcggtgcgacttctcttcaggagtcaggtgcac

SEQ ID NO: 19756 - RNA, 121 nt, synthetic construct
  source 1..121: mol_type = other RNA
  modified_base 1: mod_base = OTHER; note = 2'-O-methyl cytidine phosphorothioate
  modified_base 2: mod_base = OTHER; note = 2'-O-methyl adenosine phosphorothioate
  modified_base 3: mod_base = OTHER; note = 2'-O-methyl uridine phosphorothioate
  modified_base 118: mod_base = OTHER; note = uridine phosphorothioate
  modified_base 119: mod_base = OTHER; note = 2'-O-methyl guanosine phosphorothioate
  modified_base 120: mod_base = OTHER; note = 2'-O-methyl cytidine phosphorothioate
  modified_base 121: mod_base = OTHER; note = 2'-O-methyl adenosine
catggtgcacctgactcctggttttagagctagaaatagcaagttaaaataaggctagtccgttatcaacttgaaaaagtggcaccgagtcggtgcgacttctcttcaggagtcaggtgca

SEQ ID NO: 19757 - RNA, 120 nt, synthetic construct
  source 1..120: mol_type = other RNA
  modified_base 1: mod_base = OTHER; note = 2'-O-methyl cytidine phosphorothioate
  modified_base 2: mod_base = OTHER; note = 2'-O-methyl adenosine phosphorothioate
  modified_base 3: mod_base = OTHER; note = 2'-O-methyl uridine phosphorothioate
  modified_base 117: mod_base = OTHER; note = guanosine phosphorothioate
  modified_base 118: mod_base = OTHER; note = 2'-O-methyl uridine phosphorothioate
  modified_base 119: mod_base = OTHER; note = 2'-O-methyl guanosine phosphorothioate
  modified_base 120: mod_base = OTHER; note = 2'-O-methyl cytidine
catggtgcacctgactcctggttttagagctagaaatagcaagttaaaataaggctagtccgttatcaacttgaaaaagtggcaccgagtcggtgcgacttctcttcaggagtcaggtgc

SEQ ID NO: 19758 - RNA, 119 nt, synthetic construct
  source 1..119: mol_type = other RNA
  modified_base 1: mod_base = OTHER; note = 2'-O-methyl cytidine phosphorothioate
  modified_base 2: mod_base = OTHER; note = 2'-O-methyl adenosine phosphorothioate
  modified_base 3: mod_base = OTHER; note = 2'-O-methyl uridine phosphorothioate
  modified_base 116: mod_base = OTHER; note = guanosine phosphorothioate
  modified_base 117: mod_base = OTHER; note = 2'-O-methyl guanosine phosphorothioate
  modified_base 118: mod_base = OTHER; note = 2'-O-methyl uridine phosphorothioate
  modified_base 119: mod_base = OTHER; note = 2'-O-methyl guanosine
catggtgcacctgactcctggttttagagctagaaatagcaagttaaaataaggctagtccgttatcaacttgaaaaagtggcaccgagtcggtgcgacttctcttcaggagtcaggtg

SEQ ID NO: 19759 - RNA, 118 nt, synthetic construct
  source 1..118: mol_type = other RNA
  modified_base 1: mod_base = OTHER; note = 2'-O-methyl cytidine phosphorothioate
  modified_base 2: mod_base = OTHER; note = 2'-O-methyl adenosine phosphorothioate
  modified_base 3: mod_base = OTHER; note = 2'-O-methyl uridine phosphorothioate
  modified_base 115: mod_base = OTHER; note = adenosine phosphorothioate
  modified_base 116: mod_base = OTHER; note = 2'-O-methyl guanosine phosphorothioate
  modified_base 117: mod_base = OTHER; note = 2'-O-methyl guanosine phosphorothioate
  modified_base 118: mod_base = OTHER; note = 2'-O-methyl uridine
catggtgcacctgactcctggttttagagctagaaatagcaagttaaaataaggctagtccgttatcaacttgaaaaagtggcaccgagtcggtgcgacttctcttcaggagtcaggt

SEQ ID NO: 19760 - RNA, 117 nt, synthetic construct
  source 1..117: mol_type = other RNA
  modified_base 1: mod_base = OTHER; note = 2'-O-methyl cytidine phosphorothioate
  modified_base 2: mod_base = OTHER; note = 2'-O-methyl adenosine phosphorothioate
  modified_base 3: mod_base = OTHER; note = 2'-O-methyl uridine phosphorothioate
  modified_base 114: mod_base = OTHER; note = cytidine phosphorothioate
  modified_base 115: mod_base = OTHER; note = 2'-O-methyl adenosine phosphorothioate
  modified_base 116: mod_base = OTHER; note = 2'-O-methyl guanosine phosphorothioate
  modified_base 117: mod_base = OTHER; note = 2'-O-methyl guanosine
catggtgcacctgactcctggttttagagctagaaatagcaagttaaaataaggctagtccgttatcaacttgaaaaagtggcaccgagtcggtgcgacttctcttcaggagtcagg

SEQ ID NO: 19761 - RNA, 125 nt, synthetic construct
  source 1..125: mol_type = other RNA
  modified_base 1: mod_base = OTHER; note = 2'-O-methyl cytidine phosphorothioate
  modified_base 2: mod_base = OTHER; note = 2'-O-methyl adenosine phosphorothioate
  modified_base 3: mod_base = OTHER; note = 2'-O-methyl uridine phosphorothioate
  modified_base 122: mod_base = OTHER; note = cytidine phosphorothioate
  modified_base 123: mod_base = OTHER; note = 2'-O-methyl adenosine phosphorothioate
  modified_base 124: mod_base = OTHER; note = 2'-O-methyl uridine phosphorothioate
  modified_base 125: mod_base = OTHER; note = 2'-O-methyl guanosine
catggtgcacctgactcctggttttagagctagaaatagcaagttaaaataaggctagtccgttatcaacttgaaaaagtggcaccgagtcggtgcacttctcttcaggagtcaggtgcaccatg

SEQ ID NO: 19762 - RNA, 124 nt, synthetic construct
  source 1..124: mol_type = other RNA
  modified_base 1: mod_base = OTHER; note = 2'-O-methyl cytidine phosphorothioate
  modified_base 2: mod_base = OTHER; note = 2'-O-methyl adenosine phosphorothioate
  modified_base 3: mod_base = OTHER; note = 2'-O-methyl uridine phosphorothioate
  modified_base 121: mod_base = OTHER; note = cytidine phosphorothioate
  modified_base 122: mod_base = OTHER; note = 2'-O-methyl cytidine phosphorothioate
  modified_base 123: mod_base = OTHER; note = 2'-O-methyl adenosine phosphorothioate
  modified_base 124: mod_base = OTHER; note = 2'-O-methyl uridine
catggtgcacctgactcctggttttagagctagaaatagcaagttaaaataaggctagtccgttatcaacttgaaaaagtggcaccgagtcggtgcacttctcttcaggagtcaggtgcaccat

SEQ ID NO: 19763 - RNA, 123 nt, synthetic construct
  source 1..123: mol_type = other RNA
  modified_base 1: mod_base = OTHER; note = 2'-O-methyl cytidine phosphorothioate
  modified_base 2: mod_base = OTHER; note = 2'-O-methyl adenosine phosphorothioate
  modified_base 3: mod_base = OTHER; note = 2'-O-methyl uridine phosphorothioate
  modified_base 120: mod_base = OTHER; note = adenosine phosphorothioate
  modified_base 121: mod_base = OTHER; note = 2'-O-methyl cytidine phosphorothioate
  modified_base 122: mod_base = OTHER; note = 2'-O-methyl cytidine phosphorothioate
  modified_base 123: mod_base = OTHER; note = 2'-O-methyl adenosine
catggtgcacctgactcctggttttagagctagaaatagcaagttaaaataaggctagtccgttatcaacttgaaaaagtggcaccgagtcggtgcacttctcttcaggagtcaggtgcacca

SEQ ID NO: 19764 - RNA, 122 nt, synthetic construct
  source 1..122: mol_type = other RNA
  modified_base 1: mod_base = OTHER; note = 2'-O-methyl cytidine phosphorothioate
  modified_base 2: mod_base = OTHER; note = 2'-O-methyl adenosine phosphorothioate
  modified_base 3: mod_base = OTHER; note = 2'-O-methyl uridine phosphorothioate
  modified_base 119: mod_base = OTHER; note = cytidine phosphorothioate
  modified_base 120: mod_base = OTHER; note = 2'-O-methyl adenosine phosphorothioate
  modified_base 121: mod_base = OTHER; note = 2'-O-methyl cytidine phosphorothioate
  modified_base 122: mod_base = OTHER; note = 2'-O-methyl cytidine
catggtgcacctgactcctggttttagagctagaaatagcaagttaaaataaggctagtccgttatcaacttgaaaaagtggcaccgagtcggtgcacttctcttcaggagtcaggtgcacc

SEQ ID NO: 19765 - RNA, 121 nt, synthetic construct
  source 1..121: mol_type = other RNA
  modified_base 1: mod_base = OTHER; note = 2'-O-methyl cytidine phosphorothioate
  modified_base 2: mod_base = OTHER; note = 2'-O-methyl adenosine phosphorothioate
  modified_base 3: mod_base = OTHER; note = 2'-O-methyl uridine phosphorothioate
  modified_base 118: mod_base = OTHER; note = guanosine phosphorothioate
  modified_base 119: mod_base = OTHER; note = 2'-O-methyl cytidine phosphorothioate
  modified_base 120: mod_base = OTHER; note = 2'-O-methyl adenosine phosphorothioate
  modified_base 121: mod_base = OTHER; note = 2'-O-methyl cytidine
catggtgcacctgactcctggttttagagctagaaatagcaagttaaaataaggctagtccgttatcaacttgaaaaagtggcaccgagtcggtgcacttctcttcaggagtcaggtgcac

SEQ ID NO: 19766 - RNA, 120 nt, synthetic construct
  source 1..120: mol_type = other RNA
  modified_base 1: mod_base = OTHER; note = 2'-O-methyl cytidine phosphorothioate
  modified_base 2: mod_base = OTHER; note = 2'-O-methyl adenosine phosphorothioate
  modified_base 3: mod_base = OTHER; note = 2'-O-methyl uridine phosphorothioate
  modified_base 117: mod_base = OTHER; note = uridine phosphorothioate
  modified_base 118: mod_base = OTHER; note = 2'-O-methyl guanosine phosphorothioate
  modified_base 119: mod_base = OTHER; note = 2'-O-methyl cytidine phosphorothioate
  modified_base 120: mod_base = OTHER; note = 2'-O-methyl adenosine
catggtgcacctgactcctggttttagagctagaaatagcaagttaaaataaggctagtccgttatcaacttgaaaaagtggcaccgagtcggtgcacttctcttcaggagtcaggtgca

SEQ ID NO: 19767 - RNA, 119 nt, synthetic construct
  source 1..119: mol_type = other RNA
  modified_base 1: mod_base = OTHER; note = 2'-O-methyl cytidine phosphorothioate
  modified_base 2: mod_base = OTHER; note = 2'-O-methyl adenosine phosphorothioate
  modified_base 3: mod_base = OTHER; note = 2'-O-methyl uridine phosphorothioate
  modified_base 116: mod_base = OTHER; note = guanosine phosphorothioate
  modified_base 117: mod_base = OTHER; note = 2'-O-methyl uridine phosphorothioate
  modified_base 118: mod_base = OTHER; note = 2'-O-methyl guanosine phosphorothioate
  modified_base 119: mod_base = OTHER; note = 2'-O-methyl cytidine
catggtgcacctgactcctggttttagagctagaaatagcaagttaaaataaggctagtccgttatcaacttgaaaaagtggcaccgagtcggtgcacttctcttcaggagtcaggtgc

SEQ ID NO: 19768 - RNA, 118 nt, synthetic construct
  source 1..118: mol_type = other RNA
  modified_base 1: mod_base = OTHER; note = 2'-O-methyl cytidine phosphorothioate
  modified_base 2: mod_base = OTHER; note = 2'-O-methyl adenosine phosphorothioate
  modified_base 3: mod_base = OTHER; note = 2'-O-methyl uridine phosphorothioate
  modified_base 115: mod_base = OTHER; note = guanosine phosphorothioate
  modified_base 116: mod_base = OTHER; note = 2'-O-methyl guanosine phosphorothioate
  modified_base 117: mod_base = OTHER; note = 2'-O-methyl uridine phosphorothioate
  modified_base 118: mod_base = OTHER; note = 2'-O-methyl guanosine
catggtgcacctgactcctggttttagagctagaaatagcaagttaaaataaggctagtccgttatcaacttgaaaaagtggcaccgagtcggtgcacttctcttcaggagtcaggtg

SEQ ID NO: 19769 - RNA, 117 nt, synthetic construct
  source 1..117: mol_type = other RNA
  modified_base 1: mod_base = OTHER; note = 2'-O-methyl cytidine phosphorothioate
  modified_base 2: mod_base = OTHER; note = 2'-O-methyl adenosine phosphorothioate
  modified_base 3: mod_base = OTHER; note = 2'-O-methyl uridine phosphorothioate
  modified_base 114: mod_base = OTHER; note = adenosine phosphorothioate
  modified_base 115: mod_base = OTHER; note = 2'-O-methyl guanosine phosphorothioate
  modified_base 116: mod_base = OTHER; note = 2'-O-methyl guanosine phosphorothioate
  modified_base 117: mod_base = OTHER; note = 2'-O-methyl uridine
catggtgcacctgactcctggttttagagctagaaatagcaagttaaaataaggctagtccgttatcaacttgaaaaagtggcaccgagtcggtgcacttctcttcaggagtcaggt

SEQ ID NO: 19770 - RNA, 116 nt, synthetic construct
  source 1..116: mol_type = other RNA
  modified_base 1: mod_base = OTHER; note = 2'-O-methyl cytidine phosphorothioate
  modified_base 2: mod_base = OTHER; note = 2'-O-methyl adenosine phosphorothioate
  modified_base 3: mod_base = OTHER; note = 2'-O-methyl uridine phosphorothioate
  modified_base 113: mod_base = OTHER; note = cytidine phosphorothioate
  modified_base 114: mod_base = OTHER; note = 2'-O-methyl adenosine phosphorothioate
  modified_base 115: mod_base = OTHER; note = 2'-O-methyl guanosine phosphorothioate
  modified_base 116: mod_base = OTHER; note = 2'-O-methyl guanosine
catggtgcacctgactcctggttttagagctagaaatagcaagttaaaataaggctagtccgttatcaacttgaaaaagtggcaccgagtcggtgcacttctcttcaggagtcagg

SEQ ID NO: 19771 - RNA, 123 nt, synthetic construct
  source 1..123: mol_type = other RNA
  modified_base 1: mod_base = OTHER; note = 2'-O-methyl cytidine phosphorothioate
  modified_base 2: mod_base = OTHER; note = 2'-O-methyl adenosine phosphorothioate
  modified_base 3: mod_base = OTHER; note = 2'-O-methyl uridine phosphorothioate
  modified_base 120: mod_base = OTHER; note = cytidine phosphorothioate
  modified_base 121: mod_base = OTHER; note = 2'-O-methyl adenosine phosphorothioate
  modified_base 122: mod_base = OTHER; note = 2'-O-methyl uridine phosphorothioate
  modified_base 123: mod_base = OTHER; note = 2'-O-methyl guanosine
catggtgcacctgactcctggttttagagctagaaatagcaagttaaaataaggctagtccgttatcaacttgaaaaagtggcaccgagtcggtgcttctcttcaggagtcaggtgcaccatg

SEQ ID NO: 19772 - RNA, 122 nt, synthetic construct
  source 1..122: mol_type = other RNA
  modified_base 1: mod_base = OTHER; note = 2'-O-methyl cytidine phosphorothioate
  modified_base 2: mod_base = OTHER; note = 2'-O-methyl adenosine phosphorothioate
  modified_base 3: mod_base = OTHER; note = 2'-O-methyl uridine phosphorothioate
  modified_base 119: mod_base = OTHER; note = cytidine phosphorothioate
  modified_base 120: mod_base = OTHER; note = 2'-O-methyl cytidine phosphorothioate
  modified_base 121: mod_base = OTHER; note = 2'-O-methyl adenosine phosphorothioate
  modified_base 122: mod_base = OTHER; note = 2'-O-methyl uridine
catggtgcacctgactcctggttttagagctagaaatagcaagttaaaataaggctagtccgttatcaacttgaaaaagtggcaccgagtcggtgcttctcttcaggagtcaggtgcaccat

SEQ ID NO: 19773 - RNA, 121 nt, synthetic construct
  source 1..121: mol_type = other RNA
  modified_base 1: mod_base = OTHER; note = 2'-O-methyl cytidine phosphorothioate
  modified_base 2: mod_base = OTHER; note = 2'-O-methyl adenosine phosphorothioate
  modified_base 3: mod_base = OTHER; note = 2'-O-methyl uridine phosphorothioate
  modified_base 118: mod_base = OTHER; note = adenosine phosphorothioate
  modified_base 119: mod_base = OTHER; note = 2'-O-methyl cytidine phosphorothioate
  modified_base 120: mod_base = OTHER; note = 2'-O-methyl cytidine phosphorothioate
  modified_base 121: mod_base = OTHER; note = 2'-O-methyl adenosine
catggtgcacctgactcctggttttagagctagaaatagcaagttaaaataaggctagtccgttatcaacttgaaaaagtggcaccgagtcggtgcttctcttcaggagtcaggtgcacca

SEQ ID NO: 19774 - RNA, 120 nt, synthetic construct
  source 1..120: mol_type = other RNA
  modified_base 1: mod_base = OTHER; note = 2'-O-methyl cytidine phosphorothioate
  modified_base 2: mod_base = OTHER; note = 2'-O-methyl adenosine phosphorothioate
  modified_base 3: mod_base = OTHER; note = 2'-O-methyl uridine phosphorothioate
  modified_base 117: mod_base = OTHER; note = cytidine phosphorothioate
  modified_base 118: mod_base = OTHER; note = 2'-O-methyl adenosine phosphorothioate
  modified_base 119: mod_base = OTHER; note = 2'-O-methyl cytidine phosphorothioate
  modified_base 120: mod_base = OTHER; note = 2'-O-methyl cytidine
catggtgcacctgactcctggttttagagctagaaatagcaagttaaaataaggctagtccgttatcaacttgaaaaagtggcaccgagtcggtgcttctcttcaggagtcaggtgcacc

SEQ ID NO: 19775 - RNA, 119 nt, synthetic construct
  source 1..119: mol_type = other RNA
  modified_base 1: mod_base = OTHER; note = 2'-O-methyl cytidine phosphorothioate
  modified_base 2: mod_base = OTHER; note = 2'-O-methyl adenosine phosphorothioate
  modified_base 3: mod_base = OTHER; note = 2'-O-methyl uridine phosphorothioate
  modified_base 116: mod_base = OTHER; note = guanosine phosphorothioate
  modified_base 117: mod_base = OTHER; note = 2'-O-methyl cytidine phosphorothioate
  modified_base 118: mod_base = OTHER; note = 2'-O-methyl adenosine phosphorothioate
  modified_base 119: mod_base = OTHER; note = 2'-O-methyl cytidine
catggtgcacctgactcctggttttagagctagaaatagcaagttaaaataaggctagtccgttatcaacttgaaaaagtggcaccgagtcggtgcttctcttcaggagtcaggtgcac

SEQ ID NO: 19776 - RNA, 118 nt, synthetic construct
  source 1..118: mol_type = other RNA
  modified_base 1: mod_base = OTHER; note = 2'-O-methyl cytidine phosphorothioate
  modified_base 2: mod_base = OTHER; note = 2'-O-methyl adenosine phosphorothioate
  modified_base 3: mod_base = OTHER; note = 2'-O-methyl uridine phosphorothioate
  modified_base 115: mod_base = OTHER; note = uridine phosphorothioate
  modified_base 116: mod_base = OTHER; note = 2'-O-methyl guanosine phosphorothioate
  modified_base 117: mod_base = OTHER; note = 2'-O-methyl cytidine phosphorothioate
  modified_base 118: mod_base = OTHER; note = 2'-O-methyl adenosine
catggtgcacctgactcctggttttagagctagaaatagcaagttaaaataaggctagtccgttatcaacttgaaaaagtggcaccgagtcggtgcttctcttcaggagtcaggtgca

SEQ ID NO: 19777 - RNA, 117 nt, synthetic construct
  source 1..117: mol_type = other RNA
  modified_base 1: mod_base = OTHER; note = 2'-O-methyl cytidine phosphorothioate
  modified_base 2: mod_base = OTHER; note = 2'-O-methyl adenosine phosphorothioate
  modified_base 3: mod_base = OTHER; note = 2'-O-methyl uridine phosphorothioate
  modified_base 114: mod_base = OTHER; note = guanosine phosphorothioate
  modified_base 115: mod_base = OTHER; note = 2'-O-methyl uridine phosphorothioate
  modified_base 116: mod_base = OTHER; note = 2'-O-methyl guanosine phosphorothioate
  modified_base 117: mod_base = OTHER; note = 2'-O-methyl cytidine
catggtgcacctgactcctggttttagagctagaaatagcaagttaaaataaggctagtccgttatcaacttgaaaaagtggcaccgagtcggtgcttctcttcaggagtcaggtgc

SEQ ID NO: 19778 - RNA, 116 nt, synthetic construct
  source 1..116: mol_type = other RNA
  modified_base 1: mod_base = OTHER; note = 2'-O-methyl cytidine phosphorothioate
  modified_base 2: mod_base = OTHER; note = 2'-O-methyl adenosine phosphorothioate
  modified_base 3: mod_base = OTHER; note = 2'-O-methyl uridine phosphorothioate
  modified_base 113: mod_base = OTHER; note = guanosine phosphorothioate
  modified_base 114: mod_base = OTHER; note = 2'-O-methyl guanosine phosphorothioate
  modified_base 115: mod_base = OTHER; note = 2'-O-methyl uridine phosphorothioate
  modified_base 116: mod_base = OTHER; note = 2'-O-methyl guanosine
catggtgcacctgactcctggttttagagctagaaatagcaagttaaaataaggctagtccgttatcaacttgaaaaagtggcaccgagtcggtgcttctcttcaggagtcaggtg

SEQ ID NO: 19779 - RNA, 115 nt, synthetic construct
  source 1..115: mol_type = other RNA
  modified_base 1: mod_base = OTHER; note = 2'-O-methyl cytidine phosphorothioate
  modified_base 2: mod_base = OTHER; note = 2'-O-methyl adenosine phosphorothioate
  modified_base 3: mod_base = OTHER; note = 2'-O-methyl uridine phosphorothioate
  modified_base 112: mod_base = OTHER; note = adenosine phosphorothioate
  modified_base 113: mod_base = OTHER; note = 2'-O-methyl guanosine phosphorothioate
  modified_base 114: mod_base = OTHER; note = 2'-O-methyl guanosine phosphorothioate
  modified_base 115: mod_base = OTHER; note = 2'-O-methyl uridine
catggtgcacctgactcctggttttagagctagaaatagcaagttaaaataaggctagtccgttatcaacttgaaaaagtggcaccgagtcggtgcttctcttcaggagtcaggt

SEQ ID NO: 19780 - RNA, 114 nt, synthetic construct
  source 1..114: mol_type = other RNA
  modified_base 1: mod_base = OTHER; note = 2'-O-methyl cytidine phosphorothioate
  modified_base 2: mod_base = OTHER; note = 2'-O-methyl adenosine phosphorothioate
  modified_base 3: mod_base = OTHER; note = 2'-O-methyl uridine phosphorothioate
  modified_base 111: mod_base = OTHER; note = cytidine phosphorothioate
  modified_base 112: mod_base = OTHER; note = 2'-O-methyl adenosine phosphorothioate
  modified_base 113: mod_base = OTHER; note = 2'-O-methyl guanosine phosphorothioate
  modified_base 114: mod_base = OTHER; note = 2'-O-methyl guanosine
catggtgcacctgactcctggttttagagctagaaatagcaagttaaaataaggctagtccgttatcaacttgaaaaagtggcaccgagtcggtgcttctcttcaggagtcagg

SEQ ID NO: 19781 - RNA, 122 nt, synthetic construct
  source 1..122: mol_type = other RNA
  modified_base 1: mod_base = OTHER; note = 2'-O-methyl cytidine phosphorothioate
  modified_base 2: mod_base = OTHER; note = 2'-O-methyl adenosine phosphorothioate
  modified_base 3: mod_base = OTHER; note = 2'-O-methyl uridine phosphorothioate
  modified_base 119: mod_base = OTHER; note = cytidine phosphorothioate
  modified_base 120: mod_base = OTHER; note = 2'-O-methyl adenosine phosphorothioate
  modified_base 121: mod_base = OTHER; note = 2'-O-methyl uridine phosphorothioate
  modified_base 122: mod_base = OTHER; note = 2'-O-methyl guanosine
catggtgcacctgactcctggttttagagctagaaatagcaagttaaaataaggctagtccgttatcaacttgaaaaagtggcaccgagtcggtgctctcttcaggagtcaggtgcaccatg

SEQ ID NO: 19782 - RNA, 121 nt, synthetic construct
  source 1..121: mol_type = other RNA
  modified_base 1: mod_base = OTHER; note = 2'-O-methyl cytidine phosphorothioate
  modified_base 2: mod_base = OTHER; note = 2'-O-methyl adenosine phosphorothioate
  modified_base 3: mod_base = OTHER; note = 2'-O-methyl uridine phosphorothioate
  modified_base 118: mod_base = OTHER; note = cytidine phosphorothioate
  modified_base 119: mod_base = OTHER; note = 2'-O-methyl cytidine phosphorothioate
  modified_base 120: mod_base = OTHER; note = 2'-O-methyl adenosine phosphorothioate
  modified_base 121: mod_base = OTHER; note = 2'-O-methyl uridine
catggtgcacctgactcctggttttagagctagaaatagcaagttaaaataaggctagtccgttatcaacttgaaaaagtggcaccgagtcggtgctctcttcaggagtcaggtgcaccat

SEQ ID NO: 19783 - RNA, 120 nt, synthetic construct
  source 1..120: mol_type = other RNA
  modified_base 1: mod_base = OTHER; note = 2'-O-methyl cytidine phosphorothioate
  modified_base 2: mod_base = OTHER; note = 2'-O-methyl adenosine phosphorothioate
  modified_base 3: mod_base = OTHER; note = 2'-O-methyl uridine phosphorothioate
  modified_base 117: mod_base = OTHER; note = adenosine phosphorothioate
  modified_base 118: mod_base = OTHER; note = 2'-O-methyl cytidine phosphorothioate
  modified_base 119: mod_base = OTHER; note = 2'-O-methyl cytidine phosphorothioate
  modified_base 120: mod_base = OTHER; note = 2'-O-methyl adenosine
catggtgcacctgactcctggttttagagctagaaatagcaagttaaaataaggctagtccgttatcaacttgaaaaagtggcaccgagtcggtgctctcttcaggagtcaggtgcacca

SEQ ID NO: 19784 - RNA, 119 nt, synthetic construct
  source 1..119: mol_type = other RNA
  modified_base 1: mod_base = OTHER; note = 2'-O-methyl cytidine phosphorothioate
  modified_base 2: mod_base = OTHER; note = 2'-O-methyl adenosine phosphorothioate
  modified_base 3: mod_base = OTHER; note = 2'-O-methyl uridine phosphorothioate
  modified_base 116: mod_base = OTHER; note = cytidine phosphorothioate
  modified_base 117: mod_base = OTHER; note = 2'-O-methyl adenosine phosphorothioate
  modified_base 118: mod_base = OTHER; note = 2'-O-methyl cytidine phosphorothioate
  modified_base 119: mod_base = OTHER; note = 2'-O-methyl cytidine
catggtgcacctgactcctggttttagagctagaaatagcaagttaaaataaggctagtccgttatcaacttgaaaaagtggcaccgagtcggtgctctcttcaggagtcaggtgcacc

SEQ ID NO: 19785 - RNA, 118 nt, synthetic construct
  source 1..118: mol_type = other RNA
  modified_base 1: mod_base = OTHER; note = 2'-O-methyl cytidine phosphorothioate
  modified_base 2: mod_base = OTHER; note = 2'-O-methyl adenosine phosphorothioate
  modified_base 3: mod_base = OTHER; note = 2'-O-methyl uridine phosphorothioate
  modified_base 115: mod_base = OTHER; note = guanosine phosphorothioate
  modified_base 116: mod_base = OTHER; note = 2'-O-methyl cytidine phosphorothioate
  modified_base 117: mod_base = OTHER; note = 2'-O-methyl adenosine phosphorothioate
  modified_base 118: mod_base = OTHER; note = 2'-O-methyl cytidine
catggtgcacctgactcctggttttagagctagaaatagcaagttaaaataaggctagtccgttatcaacttgaaaaagtggcaccgagtcggtgctctcttcaggagtcaggtgcac

SEQ ID NO: 19786 - RNA, 117 nt, synthetic construct
  source 1..117: mol_type = other RNA
  modified_base 1: mod_base = OTHER; note = 2'-O-methyl cytidine phosphorothioate
  modified_base 2: mod_base = OTHER; note = 2'-O-methyl adenosine phosphorothioate
  modified_base 3: mod_base = OTHER; note = 2'-O-methyl uridine phosphorothioate
  modified_base 114: mod_base = OTHER; note = uridine phosphorothioate
  modified_base 115: mod_base = OTHER; note = 2'-O-methyl guanosine phosphorothioate
  modified_base 116: mod_base = OTHER; note = 2'-O-methyl cytidine phosphorothioate
  modified_base 117: mod_base = OTHER; note = 2'-O-methyl adenosine
catggtgcacctgactcctggttttagagctagaaatagcaagttaaaataaggctagtccgttatcaacttgaaaaagtggcaccgagtcggtgctctcttcaggagtcaggtgca

SEQ ID NO: 19787 - RNA, 116 nt, synthetic construct
  source 1..116: mol_type = other RNA
  modified_base 1: mod_base = OTHER; note = 2'-O-methyl cytidine phosphorothioate
  modified_base 2: mod_base = OTHER; note = 2'-O-methyl adenosine phosphorothioate
  modified_base 3: mod_base = OTHER; note = 2'-O-methyl uridine phosphorothioate
  modified_base 113: mod_base = OTHER; note = guanosine phosphorothioate
  modified_base 114: mod_base = OTHER; note = 2'-O-methyl uridine phosphorothioate
  modified_base 115: mod_base = OTHER; note = 2'-O-methyl guanosine phosphorothioate
  modified_base 116: mod_base = OTHER; note = 2'-O-methyl cytidine
catggtgcacctgactcctggttttagagctagaaatagcaagttaaaataaggctagtccgttatcaacttgaaaaagtggcaccgagtcggtgctctcttcaggagtcaggtgc

SEQ ID NO: 19788 - RNA, 115 nt, synthetic construct
  source 1..115: mol_type = other RNA
  modified_base 1: mod_base = OTHER; note = 2'-O-methyl cytidine phosphorothioate
  modified_base 2: mod_base = OTHER; note = 2'-O-methyl adenosine phosphorothioate
  modified_base 3: mod_base = OTHER; note = 2'-O-methyl uridine phosphorothioate
  modified_base 112: mod_base = OTHER; note = guanosine phosphorothioate
  modified_base 113: mod_base = OTHER; note = 2'-O-methyl guanosine phosphorothioate
  modified_base 114: mod_base = OTHER; note = 2'-O-methyl uridine phosphorothioate
  modified_base 115: mod_base = OTHER; note = 2'-O-methyl guanosine
catggtgcacctgactcctggttttagagctagaaatagcaagttaaaataaggctagtccgttatcaacttgaaaaagtggcaccgagtcggtgctctcttcaggagtcaggtg

SEQ ID NO: 19789 - RNA, 114 nt, synthetic construct
  source 1..114: mol_type = other RNA
  modified_base 1: mod_base = OTHER; note = 2'-O-methyl cytidine phosphorothioate
  modified_base 2: mod_base = OTHER; note = 2'-O-methyl adenosine phosphorothioate
  modified_base 3: mod_base = OTHER; note = 2'-O-methyl uridine phosphorothioate
  modified_base 111: mod_base = OTHER; note = adenosine phosphorothioate
  modified_base 112: mod_base = OTHER; note = 2'-O-methyl guanosine phosphorothioate
  modified_base 113: mod_base = OTHER; note = 2'-O-methyl guanosine phosphorothioate
  modified_base 114: mod_base = OTHER; note = 2'-O-methyl uridine
catggtgcacctgactcctggttttagagctagaaatagcaagttaaaataaggctagtccgttatcaacttgaaaaagtggcaccgagtcggtgctctcttcaggagtcaggt

SEQ ID NO: 19790 - RNA, 113 nt, synthetic construct
  source 1..113: mol_type = other RNA
  modified_base 1: mod_base = OTHER; note = 2'-O-methyl cytidine phosphorothioate
  modified_base 2: mod_base = OTHER; note = 2'-O-methyl adenosine phosphorothioate
  modified_base 3: mod_base = OTHER; note = 2'-O-methyl uridine phosphorothioate
  modified_base 110: mod_base = OTHER; note = cytidine phosphorothioate
  modified_base 111: mod_base = OTHER; note = 2'-O-methyl adenosine phosphorothioate
  modified_base 112: mod_base = OTHER; note = 2'-O-methyl guanosine phosphorothioate
  modified_base 113: mod_base = OTHER; note = 2'-O-methyl guanosine
catggtgcacctgactcctggttttagagctagaaatagcaagttaaaataaggctagtccgttatcaacttgaaaaagtggcaccgagtcggtgctctcttcaggagtcagg

SEQ ID NO: 19791 - DNA, 133 bp, synthetic construct
  source 1..133: mol_type = other DNA
catggtgcatctgactcctggttttagagctagaaatagcaagttaaaataaggctagtccgttatcaacttgaaaaagtggcaccgagtcggtgcaacggcagacttctcttcaggagtcagatgcaccatg

SEQ ID NO: 19792 - DNA, 132 bp, synthetic construct
  source 1..132: mol_type = other DNA
catggtgcatctgactcctggttttagagctagaaatagcaagttaaaataaggctagtccgttatcaacttgaaaaagtggcaccgagtcggtgcaacggcagacttctcttcaggagtcagatgcaccat

SEQ ID NO: 19793 - DNA, 131 bp, synthetic construct
  source 1..131: mol_type = other DNA
catggtgcatctgactcctggttttagagctagaaatagcaagttaaaataaggctagtccgttatcaacttgaaaaagtggcaccgagtcggtgcaacggcagacttctcttcaggagtcagatgcacca

SEQ ID NO: 19794 - DNA, 130 bp, synthetic construct
  source 1..130: mol_type = other DNA
catggtgcatctgactcctggttttagagctagaaatagcaagttaaaataaggctagtccgttatcaacttgaaaaagtggcaccgagtcggtgcaacggcagacttctcttcaggagtcagatgcacc

SEQ ID NO: 19795 - DNA, 129 bp, synthetic construct
  source 1..129: mol_type = other DNA
catggtgcatctgactcctggttttagagctagaaatagcaagttaaaataaggctagtccgttatcaacttgaaaaagtggcaccgagtcggtgcaacggcagacttctcttcaggagtcagatgcac

SEQ ID NO: 19796 - DNA, 128 bp, synthetic construct
  source 1..128: mol_type = other DNA
catggtgcatctgactcctggttttagagctagaaatagcaagttaaaataaggctagtccgttatcaacttgaaaaagtggcaccgagtcggtgcaacggcagacttctcttcaggagtcagatgca

SEQ ID NO: 19797 - DNA, 127 bp, synthetic construct
  source 1..127: mol_type = other DNA
catggtgcatctgactcctggttttagagctagaaatagcaagttaaaataaggctagtccgttatcaacttgaaaaagtggcaccgagtcggtgcaacggcagacttctcttcaggagtcagatgc

SEQ ID NO: 19798 - DNA, 126 bp, synthetic construct
  source 1..126: mol_type = other DNA
catggtgcatctgactcctggttttagagctagaaatagcaagttaaaataaggctagtccgttatcaacttgaaaaagtggcaccgagtcggtgcaacggcagacttctcttcaggagtcagatg

SEQ ID NO: 19799 - DNA, 125 bp, synthetic construct
  source 1..125: mol_type = other DNA
catggtgcatctgactcctggttttagagctagaaatagcaagttaaaataaggctagtccgttatcaacttgaaaaagtggcaccgagtcggtgcaacggcagacttctcttcaggagtcagat

SEQ ID NO: 19800 - DNA, 124 bp, synthetic construct
  source 1..124: mol_type = other DNA
catggtgcatctgactcctggttttagagctagaaatagcaagttaaaataaggctagtccgttatcaacttgaaaaagtggcaccgagtcggtgcaacggcagacttctcttcaggagtcaga

SEQ ID NO: 19801 - DNA, 132 bp, synthetic construct
  source 1..132: mol_type = other DNA
catggtgcatctgactcctggttttagagctagaaatagcaagttaaaataaggctagtccgttatcaacttgaaaaagtggcaccgagtcggtgcacggcagacttctcttcaggagtcagatgcaccatg

SEQ ID NO: 19802 - DNA, 131 bp, synthetic construct
  source 1..131: mol_type = other DNA
catggtgcatctgactcctggttttagagctagaaatagcaagttaaaataaggctagtccgttatcaacttgaaaaagtggcaccgagtcggtgcacggcagacttctcttcaggagtcagatgcaccat

SEQ ID NO: 19803 - DNA, 130 bp, synthetic construct
  source 1..130: mol_type = other DNA
catggtgcatctgactcctggttttagagctagaaatagcaagttaaaataaggctagtccgttatcaacttgaaaaagtggcaccgagtcggtgcacggcagacttctcttcaggagtcagatgcacca

SEQ ID NO: 19804 - DNA, 129 bp, synthetic construct
  source 1..129: mol_type = other DNA
catggtgcatctgactcctggttttagagctagaaatagcaagttaaaataaggctagtccgttatcaacttgaaaaagtggcaccgagtcggtgcacggcagacttctcttcaggagtcagatgcacc

SEQ ID NO: 19805 - DNA, 128 bp, synthetic construct
  source 1..128: mol_type = other DNA
catggtgcatctgactcctggttttagagctagaaatagcaagttaaaataaggctagtccgttatcaacttgaaaaagtggcaccgagtcggtgcacggcagacttctcttcaggagtcagatgcac

SEQ ID NO: 19806 - DNA, 127 bp, synthetic construct
  source 1..127: mol_type = other DNA
catggtgcatctgactcctggttttagagctagaaatagcaagttaaaataaggctagtccgttatcaacttgaaaaagtggcaccgagtcggtgcacggcagacttctcttcaggagtcagatgca

SEQ ID NO: 19807 - DNA, 126 bp, synthetic construct
  source 1..126: mol_type = other DNA
catggtgcatctgactcctggttttagagctagaaatagcaagttaaaataaggctagtccgttatcaacttgaaaaagtggcaccgagtcggtgcacggcagacttctcttcaggagtcagatgc

SEQ ID NO: 19808 - DNA, 125 bp, synthetic construct
  source 1..125: mol_type = other DNA
catggtgcatctgactcctggttttagagctagaaatagcaagttaaaataaggctagtccgttatcaacttgaaaaagtggcaccgagtcggtgcacggcagacttctcttcaggagtcagatg

SEQ ID NO: 19809 - DNA, 124 bp, synthetic construct
  source 1..124: mol_type = other DNA
catggtgcatctgactcctggttttagagctagaaatagcaagttaaaataaggctagtccgttatcaacttgaaaaagtggcaccgagtcggtgcacggcagacttctcttcaggagtcagat

SEQ ID NO: 19810 - DNA, 123 bp, synthetic construct
  source 1..123: mol_type = other DNA
catggtgcatctgactcctggttttagagctagaaatagcaagttaaaataaggctagtccgttatcaacttgaaaaagtggcaccgagtcggtgcacggcagacttctcttcaggagtcaga

SEQ ID NO: 19811 - DNA, 130 bp, synthetic construct
  source 1..130: mol_type = other DNA
catggtgcatctgactcctggttttagagctagaaatagcaagttaaaataaggctagtccgttatcaacttgaaaaagtggcaccgagtcggtgcggcagacttctcttcaggagtcagatgcaccatg

SEQ ID NO: 19812 - DNA, 129 bp, synthetic construct
  source 1..129: mol_type = other DNA
catggtgcatctgactcctggttttagagctagaaatagcaagttaaaataaggctagtccgttatcaacttgaaaaagtggcaccgagtcggtgcggcagacttctcttcaggagtcagatgcaccat

SEQ ID NO: 19813 - DNA, 128 bp, synthetic construct
  source 1..128: mol_type = other DNA
catggtgcatctgactcctggttttagagctagaaatagcaagttaaaataaggctagtccgttatcaacttgaaaaagtggcaccgagtcggtgcggcagacttctcttcaggagtcagatgcacca

SEQ ID NO: 19814 - DNA, 127 bp, synthetic construct
  source 1..127: mol_type = other DNA
catggtgcatctgactcctggttttagagctagaaatagcaagttaaaataaggctagtccgttatcaacttgaaaaagtggcaccgagtcggtgcggcagacttctcttcaggagtcagatgcacc

SEQ ID NO: 19815 - DNA, 126 bp, synthetic construct
  source 1..126: mol_type = other DNA
catggtgcatctgactcctggttttagagctagaaatagcaagttaaaataaggctagtccgttatcaacttgaaaaagtggcaccgagtcggtgcggcagacttctcttcaggagtcagatgcac

SEQ ID NO: 19816 - DNA, 125 bp, synthetic construct
  source 1..125: mol_type = other DNA
catggtgcatctgactcctggttttagagctagaaatagcaagttaaaataaggctagtccgttatcaacttgaaaaagtggcaccgagtcggtgcggcagacttctcttcaggagtcagatgca

SEQ ID NO: 19817 - DNA, 124 bp, synthetic construct
  source 1..124: mol_type = other DNA
catggtgcatctgactcctggttttagagctagaaatagcaagttaaaataaggctagtccgttatcaacttgaaaaagtggcaccgagtcggtgcggcagacttctcttcaggagtcagatgc

SEQ ID NO: 19818 - DNA, 123 bp, synthetic construct
  source 1..123: mol_type = other DNA
catggtgcatctgactcctggttttagagctagaaatagcaagttaaaataaggctagtccgttatcaacttgaaaaagtggcaccgagtcggtgcggcagacttctcttcaggagtcagatg

SEQ ID NO: 19819 - DNA, 122 bp, synthetic construct
  source 1..122: mol_type = other DNA
catggtgcatctgactcctggttttagagctagaaatagcaagttaaaataaggctagtccgttatcaacttgaaaaagtggcaccgagtcggtgcggcagacttctcttcaggagtcagat

SEQ ID NO: 19820 - DNA, 121 bp, synthetic construct
  source 1..121: mol_type = other DNA
catggtgcatctgactcctggttttagagctagaaatagcaagttaaaataaggctagtccgttatcaacttgaaaaagtggcaccgagtcggtgcggcagacttctcttcaggagtcaga

SEQ ID NO: 19821 - DNA, 129 bp, synthetic construct
  source 1..129: mol_type = other DNA
catggtgcatctgactcctggttttagagctagaaatagcaagttaaaataaggctagtccgttatcaacttgaaaaagtggcaccgagtcggtgcgcagacttctcttcaggagtcagatgcaccatg

SEQ ID NO: 19822 - DNA, 128 bp, synthetic construct
  source 1..128: mol_type = other DNA
catggtgcatctgactcctggttttagagctagaaatagcaagttaaaataaggctagtccgttatcaacttgaaaaagtggcaccgagtcggtgcgcagacttctcttcaggagtcagatgcaccat

SEQ ID NO: 19823 - DNA, 127 bp, synthetic construct
  source 1..127: mol_type = other DNA
catggtgcatctgactcctggttttagagctagaaatagcaagttaaaataaggctagtccgttatcaacttgaaaaagtggcaccgagtcggtgcgcagacttctcttcaggagtcagatgcacca

SEQ ID NO: 19824 - DNA, 126 bp, synthetic construct
  source 1..126: mol_type = other DNA
catggtgcatctgactcctggttttagagctagaaatagcaagttaaaataaggctagtccgttatcaacttgaaaaagtggcaccgagtcggtgcgcagacttctcttcaggagtcagatgcacc

SEQ ID NO: 19825 - DNA, 125 bp, synthetic construct
  source 1..125: mol_type = other DNA
catggtgcatctgactcctggttttagagctagaaatagcaagttaaaataaggctagtccgttatcaacttgaaaaagtggcaccgagtcggtgcgcagacttctcttcaggagtcagatgcac

SEQ ID NO: 19826 - DNA, 124 bp, synthetic construct
  source 1..124: mol_type = other DNA
catggtgcatctgactcctggttttagagctagaaatagcaagttaaaataaggctagtccgttatcaacttgaaaaagtggcaccgagtcggtgcgcagacttctcttcaggagtcagatgca

SEQ ID NO: 19827 - DNA, 123 bp, synthetic construct
  source 1..123: mol_type = other DNA
catggtgcatctgactcctggttttagagctagaaatagcaagttaaaataaggctagtccgttatcaacttgaaaaagtggcaccgagtcggtgcgcagacttctcttcaggagtcagatgc

SEQ ID NO: 19828 - DNA, 122 bp, synthetic construct
  source 1..122: mol_type = other DNA
catggtgcatctgactcctggttttagagctagaaatagcaagttaaaataaggctagtccgttatcaacttgaaaaagtggcaccgagtcggtgcgcagacttctcttcaggagtcagatg

SEQ ID NO: 19829 - DNA, 121 bp, synthetic construct
  source 1..121: mol_type = other DNA
catggtgcatctgactcctggttttagagctagaaatagcaagttaaaataaggctagtccgttatcaacttgaaaaagtggcaccgagtcggtgcgcagacttctcttcaggagtcagat

SEQ ID NO: 19830 - DNA, 120 bp, synthetic construct
  source 1..120: mol_type = other DNA
catggtgcatctgactcctggttttagagctagaaatagcaagttaaaataaggctagtccgttatcaacttgaaaaagtggcaccgagtcggtgcgcagacttctcttcaggagtcaga

SEQ ID NO: 19831 - DNA, 127 bp, synthetic construct
  source 1..127: mol_type = other DNA
catggtgcatctgactcctggttttagagctagaaatagcaagttaaaataaggctagtccgttatcaacttgaaaaagtggcaccgagtcggtgcagacttctcttcaggagtcagatgcaccatg

SEQ ID NO: 19832 - DNA, 126 bp, synthetic construct
  source 1..126: mol_type = other DNA
catggtgcatctgactcctggttttagagctagaaatagcaagttaaaataaggctagtccgttatcaacttgaaaaagtggcaccgagtcggtgcagacttctcttcaggagtcagatgcaccat

SEQ ID NO: 19833 - DNA, 125 bp, synthetic construct
  source 1..125: mol_type = other DNA
catggtgcatctgactcctggttttagagctagaaatagcaagttaaaataaggctagtccgttatcaacttgaaaaagtggcaccgagtcggtgcagacttctcttcaggagtcagatgcacca

SEQ ID NO: 19834 - DNA, 124 bp, synthetic construct
  source 1..124: mol_type = other DNA
catggtgcatctgactcctggttttagagctagaaatagcaagttaaaataaggctagtccgttatcaacttgaaaaagtggcaccgagtcggtgcagacttctcttcaggagtcagatgcacc

SEQ ID NO: 19835 - DNA, 123 bp, synthetic construct
  source 1..123: mol_type = other DNA
catggtgcatctgactcctggttttagagctagaaatagcaagttaaaataaggctagtccgttatcaacttgaaaaagtggcaccgagtcggtgcagacttctcttcaggagtcagatgcac

SEQ ID NO: 19836 - DNA, 122 bp, synthetic construct
  source 1..122: mol_type = other DNA
catggtgcatctgactcctggttttagagctagaaatagcaagttaaaataaggctagtccgttatcaacttgaaaaagtggcaccgagtcggtgcagacttctcttcaggagtcagatgca

SEQ ID NO: 19837 - DNA, 121 bp, synthetic construct
  source 1..121: mol_type = other DNA
catggtgcatctgactcctggttttagagctagaaatagcaagttaaaataaggctagtccgttatcaacttgaaaaagtggcaccgagtcggtgcagacttctcttcaggagtcagatgc

SEQ ID NO: 19838 - DNA, 120 bp, synthetic construct
  source 1..120: mol_type = other DNA
catggtgcatctgactcctggttttagagctagaaatagcaagttaaaataaggctagtccgttatcaacttgaaaaagtggcaccgagtcggtgcagacttctcttcaggagtcagatg

SEQ ID NO: 19839 - DNA, 119 bp, synthetic construct
  source 1..119: mol_type = other DNA
catggtgcatctgactcctggttttagagctagaaatagcaagttaaaataaggctagtccgttatcaacttgaaaaagtggcaccgagtcggtgcagacttctcttcaggagtcagat

SEQ ID NO: 19840 - DNA, 118 bp, synthetic construct
  source 1..118: mol_type = other DNA
catggtgcatctgactcctggttttagagctagaaatagcaagttaaaataaggctagtccgttatcaacttgaaaaagtggcaccgagtcggtgcagacttctcttcaggagtcaga

SEQ ID NO: 19841 - DNA, 126 bp, synthetic construct
  source 1..126: mol_type = other DNA
catggtgcatctgactcctggttttagagctagaaatagcaagttaaaataaggctagtccgttatcaacttgaaaaagtggcaccgagtcggtgcgacttctcttcaggagtcagatgcaccatg

SEQ ID NO: 19842 - DNA, 125 bp, synthetic construct
  source 1..125: mol_type = other DNA
catggtgcatctgactcctggttttagagctagaaatagcaagttaaaataaggctagtccgttatcaacttgaaaaagtggcaccgagtcggtgcgacttctcttcaggagtcagatgcaccat

SEQ ID NO: 19843 - DNA, 124 bp, synthetic construct
  source 1..124: mol_type = other DNA
catggtgcatctgactcctggttttagagctagaaatagcaagttaaaataaggctagtccgttatcaacttgaaaaagtggcaccgagtcggtgcgacttctcttcaggagtcagatgcacca

SEQ ID NO: 19844 - DNA, 123 bp, synthetic construct
  source 1..123: mol_type = other DNA
catggtgcatctgactcctggttttagagctagaaatagcaagttaaaataaggctagtccgttatcaacttgaaaaagtggcaccgagtcggtgcgacttctcttcaggagtcagatgcacc

SEQ ID NO: 19845 - DNA, 122 bp, synthetic construct
  source 1..122: mol_type = other DNA
catggtgcatctgactcctggttttagagctagaaatagcaagttaaaataaggctagtccgttatcaacttgaaaaagtggcaccgagtcggtgcgacttctcttcaggagtcagatgcac

SEQ ID NO: 19846 - DNA, 121 bp, synthetic construct
  source 1..121: mol_type = other DNA
catggtgcatctgactcctggttttagagctagaaatagcaagttaaaataaggctagtccgttatcaacttgaaaaagtggcaccgagtcggtgcgacttctcttcaggagtcagatgca

SEQ ID NO: 19847 - DNA, 120 bp, synthetic construct
  source 1..120: mol_type = other DNA
catggtgcatctgactcctggttttagagctagaaatagcaagttaaaataaggctagtccgttatcaacttgaaaaagtggcaccgagtcggtgcgacttctcttcaggagtcagatgc

SEQ ID NO: 19848 - DNA, 119 bp, synthetic construct
  source 1..119: mol_type = other DNA
catggtgcatctgactcctggttttagagctagaaatagcaagttaaaataaggctagtccgttatcaacttgaaaaagtggcaccgagtcggtgcgacttctcttcaggagtcagatg

SEQ ID NO: 19849 - DNA, 118 bp, synthetic construct
  source 1..118: mol_type = other DNA
catggtgcatctgactcctggttttagagctagaaatagcaagttaaaataaggctagtccgttatcaacttgaaaaagtggcaccgagtcggtgcgacttctcttcaggagtcagat

SEQ ID NO: 19850 - DNA, 117 bp, synthetic construct
  source 1..117: mol_type = other DNA
catggtgcatctgactcctggttttagagctagaaatagcaagttaaaataaggctagtccgttatcaacttgaaaaagtggcaccgagtcggtgcgacttctcttcaggagtcaga

SEQ ID NO: 19851 - DNA, 125 bp, synthetic construct
  source 1..125: mol_type = other DNA
catggtgcatctgactcctggttttagagctagaaatagcaagttaaaataaggctagtccgttatcaacttgaaaaagtggcaccgagtcggtgcacttctcttcaggagtcagatgcaccatg

SEQ ID NO: 19852 - DNA, 124 bp, synthetic construct
  source 1..124: mol_type = other DNA
catggtgcatctgactcctggttttagagctagaaatagcaagttaaaataaggctagtccgttatcaacttgaaaaagtggcaccgagtcggtgcacttctcttcaggagtcagatgcaccat

SEQ ID NO: 19853 - DNA, 123 bp, synthetic construct
  source 1..123: mol_type = other DNA
catggtgcatctgactcctggttttagagctagaaatagcaagttaaaataaggctagtccgttatcaacttgaaaaagtggcaccgagtcggtgcacttctcttcaggagtcagatgcacca

SEQ ID NO: 19854 - DNA, 122 bp, synthetic construct
  source 1..122: mol_type = other DNA
catggtgcatctgactcctggttttagagctagaaatagcaagttaaaataaggctagtccgttatcaacttgaaaaagtggcaccgagtcggtgcacttctcttcaggagtcagatgcacc

SEQ ID NO: 19855 - DNA, 121 bp, synthetic construct
  source 1..121: mol_type = other DNA
catggtgcatctgactcctggttttagagctagaaatagcaagttaaaataaggctagtccgttatcaacttgaaaaagtggcaccgagtcggtgcacttctcttcaggagtcagatgcac

SEQ ID NO: 19856 - DNA, 120 bp, synthetic construct
  source 1..120: mol_type = other DNA
catggtgcatctgactcctggttttagagctagaaatagcaagttaaaataaggctagtccgttatcaacttgaaaaagtggcaccgagtcggtgcacttctcttcaggagtcagatgca

SEQ ID NO: 19857 - DNA, 119 bp, synthetic construct
  source 1..119: mol_type = other DNA
catggtgcatctgactcctggttttagagctagaaatagcaagttaaaataaggctagtccgttatcaacttgaaaaagtggcaccgagtcggtgcacttctcttcaggagtcagatgc

SEQ ID NO: 19858 - DNA, 118 bp, synthetic construct
  source 1..118: mol_type = other DNA
catggtgcatctgactcctggttttagagctagaaatagcaagttaaaataaggctagtccgttatcaacttgaaaaagtggcaccgagtcggtgcacttctcttcaggagtcagatg

SEQ ID NO: 19859 - DNA, 117 bp, synthetic construct
  source 1..117: mol_type = other DNA
catggtgcatctgactcctggttttagagctagaaatagcaagttaaaataaggctagtccgttatcaacttgaaaaagtggcaccgagtcggtgcacttctcttcaggagtcagat

SEQ ID NO: 19860 - DNA, 116 bp, synthetic construct
  source 1..116: mol_type = other DNA
catggtgcatctgactcctggttttagagctagaaatagcaagttaaaataaggctagtccgttatcaacttgaaaaagtggcaccgagtcggtgcacttctcttcaggagtcaga

SEQ ID NO: 19861 - DNA, 123 bp, synthetic construct
  source 1..123: mol_type = other DNA
catggtgcatctgactcctggttttagagctagaaatagcaagttaaaataaggctagtccgttatcaacttgaaaaagtggcaccgagtcggtgcttctcttcaggagtcagatgcaccatg

SEQ ID NO: 19862 - DNA, 122 bp, synthetic construct
  source 1..122: mol_type = other DNA
catggtgcatctgactcctggttttagagctagaaatagcaagttaaaataaggctagtccgttatcaacttgaaaaagtggcaccgagtcggtgcttctcttcaggagtcagatgcaccat

SEQ ID NO: 19863 - DNA, 121 bp, synthetic construct
  source 1..121: mol_type = other DNA
catggtgcatctgactcctggttttagagctagaaatagcaagttaaaataaggctagtccgttatcaacttgaaaaagtggcaccgagtcggtgcttctcttcaggagtcagatgcacca

SEQ ID NO: 19864 - DNA, 120 bp, synthetic construct
  source 1..120: mol_type = other DNA
catggtgcatctgactcctggttttagagctagaaatagcaagttaaaataaggctagtccgttatcaacttgaaaaagtggcaccgagtcggtgcttctcttcaggagtcagatgcacc

SEQ ID NO: 19865 - DNA, 119 bp, synthetic construct
  source 1..119: mol_type = other DNA
catggtgcatctgactcctggttttagagctagaaatagcaagttaaaataaggctagtccgttatcaacttgaaaaagtggcaccgagtcggtgcttctcttcaggagtcagatgcac

SEQ ID NO: 19866 - DNA, 118 bp, synthetic construct
  source 1..118: mol_type = other DNA
catggtgcatctgactcctggttttagagctagaaatagcaagttaaaataaggctagtccgttatcaacttgaaaaagtggcaccgagtcggtgcttctcttcaggagtcagatgca

SEQ ID NO: 19867 - DNA, 117 bp, synthetic construct
  source 1..117: mol_type = other DNA
catggtgcatctgactcctggttttagagctagaaatagcaagttaaaataaggctagtccgttatcaacttgaaaaagtggcaccgagtcggtgcttctcttcaggagtcagatgc

SEQ ID NO: 19868 - DNA, 116 bp, synthetic construct
  source 1..116: mol_type = other DNA
catggtgcatctgactcctggttttagagctagaaatagcaagttaaaataaggctagtccgttatcaacttgaaaaagtggcaccgagtcggtgcttctcttcaggagtcagatg

SEQ ID NO: 19869 - DNA, 115 bp, synthetic construct
  source 1..115: mol_type = other DNA
catggtgcatctgactcctggttttagagctagaaatagcaagttaaaataaggctagtccgttatcaacttgaaaaagtggcaccgagtcggtgcttctcttcaggagtcagat

SEQ ID NO: 19870 - DNA, 114 bp, synthetic construct
  source 1..114: mol_type = other DNA
catggtgcatctgactcctggttttagagctagaaatagcaagttaaaataaggctagtccgttatcaacttgaaaaagtggcaccgagtcggtgcttctcttcaggagtcaga

SEQ ID NO: 19871 - DNA, 122 bp, synthetic construct
  source 1..122: mol_type = other DNA
catggtgcatctgactcctggttttagagctagaaatagcaagttaaaataaggctagtccgttatcaacttgaaaaagtggcaccgagtcggtgctctcttcaggagtcagatgcaccatg

SEQ ID NO: 19872 - DNA, 121 bp, synthetic construct
  source 1..121: mol_type = other DNA
catggtgcatctgactcctggttttagagctagaaatagcaagttaaaataaggctagtccgttatcaacttgaaaaagtggcaccgagtcggtgctctcttcaggagtcagatgcaccat

SEQ ID NO: 19873 - DNA, 120 bp, synthetic construct
  source 1..120: mol_type = other DNA
catggtgcatctgactcctggttttagagctagaaatagcaagttaaaataaggctagtccgttatcaacttgaaaaagtggcaccgagtcggtgctctcttcaggagtcagatgcacca

SEQ ID NO: 19874 - DNA, 119 bp, synthetic construct
  source 1..119: mol_type = other DNA
catggtgcatctgactcctggttttagagctagaaatagcaagttaaaataaggctagtccgttatcaacttgaaaaagtggcaccgagtcggtgctctcttcaggagtcagatgcacc

SEQ ID NO: 19875 - DNA, 118 bp, synthetic construct
  source 1..118: mol_type = other DNA
catggtgcatctgactcctggttttagagctagaaatagcaagttaaaataaggctagtccgttatcaacttgaaaaagtggcaccgagtcggtgctctcttcaggagtcagatgcac

SEQ ID NO: 19876 - DNA, 117 bp, synthetic construct
  source 1..117: mol_type = other DNA
catggtgcatctgactcctggttttagagctagaaatagcaagttaaaataaggctagtccgttatcaacttgaaaaagtggcaccgagtcggtgctctcttcaggagtcagatgca

SEQ ID NO: 19877 - DNA, 116 bp, synthetic construct
  source 1..116: mol_type = other DNA
catggtgcatctgactcctggttttagagctagaaatagcaagttaaaataaggctagtccgttatcaacttgaaaaagtggcaccgagtcggtgctctcttcaggagtcagatgc

SEQ ID NO: 19878 - DNA, 115 bp, synthetic construct
  source 1..115: mol_type = other DNA
catggtgcatctgactcctggttttagagctagaaatagcaagttaaaataaggctagtccgttatcaacttgaaaaagtggcaccgagtcggtgctctcttcaggagtcagatg

SEQ ID NO: 19879 - DNA, 114 bp, synthetic construct
  source 1..114: mol_type = other DNA
catggtgcatctgactcctggttttagagctagaaatagcaagttaaaataaggctagtccgttatcaacttgaaaaagtggcaccgagtcggtgctctcttcaggagtcagat

SEQ ID NO: 19880 - DNA, 113 bp, synthetic construct
  source 1..113: mol_type = other DNA
catggtgcatctgactcctggttttagagctagaaatagcaagttaaaataaggctagtccgttatcaacttgaaaaagtggcaccgagtcggtgctctcttcaggagtcaga

SEQ ID NO: 19881 - DNA, 133 bp, synthetic construct
  source 1..133: mol_type = other DNA
catggtgcatctgactcctggttttagagctagaaatagcaagttaaaataaggctagtccgttatcaacttgaaaaagtggcaccgagtcggtgcaacggcagacttctcgtcaggagtcagatgcaccatg

SEQ ID NO: 19882 - DNA, 132 bp, synthetic construct
  source 1..132: mol_type = other DNA
catggtgcatctgactcctggttttagagctagaaatagcaagttaaaataaggctagtccgttatcaacttgaaaaagtggcaccgagtcggtgcaacggcagacttctcgtcaggagtcagatgcaccat

SEQ ID NO: 19883 - DNA, 131 bp, synthetic construct
  source 1..131: mol_type = other DNA
catggtgcatctgactcctggttttagagctagaaatagcaagttaaaataaggctagtccgttatcaacttgaaaaagtggcaccgagtcggtgcaacggcagacttctcgtcaggagtcagatgcacca

SEQ ID NO: 19884 - DNA, 130 bp, synthetic construct
  source 1..130: mol_type = other DNA
catggtgcatctgactcctggttttagagctagaaatagcaagttaaaataaggctagtccgttatcaacttgaaaaagtggcaccgagtcggtgcaacggcagacttctcgtcaggagtcagatgcacc

SEQ ID NO: 19885 - DNA, 129 bp, synthetic construct
  source 1..129: mol_type = other DNA
catggtgcatctgactcctggttttagagctagaaatagcaagttaaaataaggctagtccgttatcaacttgaaaaagtggcaccgagtcggtgcaacggcagacttctcgtcaggagtcagatgcac

SEQ ID NO: 19886 - DNA, 128 bp, synthetic construct
  source 1..128: mol_type = other DNA
catggtgcatctgactcctggttttagagctagaaatagcaagttaaaataaggctagtccgttatcaacttgaaaaagtggcaccgagtcggtgcaacggcagacttctcgtcaggagtcagatgca

SEQ ID NO: 19887 - DNA, 127 bp, synthetic construct
  source 1..127: mol_type = other DNA
catggtgcatctgactcctggttttagagctagaaatagcaagttaaaataaggctagtccgttatcaacttgaaaaagtggcaccgagtcggtgcaacggcagacttctcgtcaggagtcagatgc

SEQ ID NO: 19888 - DNA, 126 bp, synthetic construct
  source 1..126: mol_type = other DNA
catggtgcatctgactcctggttttagagctagaaatagcaagttaaaataaggctagtccgttatcaacttgaaaaagtggcaccgagtcggtgcaacggcagacttctcgtcaggagtcagatg

SEQ ID NO: 19889 - DNA, 125 bp, synthetic construct
  source 1..125: mol_type = other DNA
catggtgcatctgactcctggttttagagctagaaatagcaagttaaaataaggctagtccgttatcaacttgaaaaagtggcaccgagtcggtgcaacggcagacttctcgtcaggagtcagat

SEQ ID NO: 19890 - DNA, 124 bp, synthetic construct
  source 1..124: mol_type = other DNA
catggtgcatctgactcctggttttagagctagaaatagcaagttaaaataaggctagtccgttatcaacttgaaaaagtggcaccgagtcggtgcaacggcagacttctcgtcaggagtcaga

SEQ ID NO: 19891 - DNA, 132 bp, synthetic construct
  source 1..132: mol_type = other DNA
catggtgcatctgactcctggttttagagctagaaatagcaagttaaaataaggctagtccgttatcaacttgaaaaagtggcaccgagtcggtgcacggcagacttctcgtcaggagtcagatgcaccatg

SEQ ID NO: 19892 - DNA, 131 bp, synthetic construct
  source 1..131: mol_type = other DNA
catggtgcatctgactcctggttttagagctagaaatagcaagttaaaataaggctagtccgttatcaacttgaaaaagtggcaccgagtcggtgcacggcagacttctcgtcaggagtcagatgcaccat

SEQ ID NO: 19893 - DNA, 130 bp, synthetic construct
  source 1..130: mol_type = other DNA
catggtgcatctgactcctggttttagagctagaaatagcaagttaaaataaggctagtccgttatcaacttgaaaaagtggcaccgagtcggtgcacggcagacttctcgtcaggagtcagatgcacca

SEQ ID NO: 19894 - DNA, 129 bp, synthetic construct
  source 1..129: mol_type = other DNA
catggtgcatctgactcctggttttagagctagaaatagcaagttaaaataaggctagtccgttatcaacttgaaaaagtggcaccgagtcggtgcacggcagacttctcgtcaggagtcagatgcacc

SEQ ID NO: 19895 - DNA, 128 bp, synthetic construct
  source 1..128: mol_type = other DNA
catggtgcatctgactcctggttttagagctagaaatagcaagttaaaataaggctagtccgttatcaacttgaaaaagtggcaccgagtcggtgcacggcagacttctcgtcaggagtcagatgcac

SEQ ID NO: 19896 - DNA, 127 bp, synthetic construct
  source 1..127: mol_type = other DNA
catggtgcatctgactcctggttttagagctagaaatagcaagttaaaataaggctagtccgttatcaacttgaaaaagtggcaccgagtcggtgcacggcagacttctcgtcaggagtcagatgca

SEQ ID NO: 19897 - DNA, 126 bp, synthetic construct
  source 1..126: mol_type = other DNA
catggtgcatctgactcctggttttagagctagaaatagcaagttaaaataaggctagtccgttatcaacttgaaaaagtggcaccgagtcggtgcacggcagacttctcgtcaggagtcagatgc

SEQ ID NO: 19898 - DNA, 125 bp, synthetic construct
  source 1..125: mol_type = other DNA
catggtgcatctgactcctggttttagagctagaaatagcaagttaaaataaggctagtccgttatcaacttgaaaaagtggcaccgagtcggtgcacggcagacttctcgtcaggagtcagatg

SEQ ID NO: 19899 - DNA, 124 bp, synthetic construct
  source 1..124: mol_type = other DNA
catggtgcatctgactcctggttttagagctagaaatagcaagttaaaataaggctagtccgttatcaacttgaaaaagtggcaccgagtcggtgcacggcagacttctcgtcaggagtcagat

SEQ ID NO: 19900 - DNA, 123 bp, synthetic construct
  source 1..123: mol_type = other DNA
catggtgcatctgactcctggttttagagctagaaatagcaagttaaaataaggctagtccgttatcaacttgaaaaagtggcaccgagtcggtgcacggcagacttctcgtcaggagtcaga

SEQ ID NO: 19901 - DNA, 130 bp, synthetic construct
  source 1..130: mol_type = other DNA
catggtgcatctgactcctggttttagagctagaaatagcaagttaaaataaggctagtccgttatcaacttgaaaaagtggcaccgagtcggtgcggcagacttctcgtcaggagtcagatgcaccatg

SEQ ID NO: 19902 - DNA, 129 bp, synthetic construct
  source 1..129: mol_type = other DNA
catggtgcatctgactcctggttttagagctagaaatagcaagttaaaataaggctagtccgttatcaacttgaaaaagtggcaccgagtcggtgcggcagacttctcgtcaggagtcagatgcaccat

SEQ ID NO: 19903 - DNA, 128 bp, synthetic construct
  source 1..128: mol_type = other DNA
catggtgcatctgactcctggttttagagctagaaatagcaagttaaaataaggctagtccgttatcaacttgaaaaagtggcaccgagtcggtgcggcagacttctcgtcaggagtcagatgcacca

SEQ ID NO: 19904 - DNA, 127 bp, synthetic construct
  source 1..127: mol_type = other DNA
catggtgcatctgactcctggttttagagctagaaatagcaagttaaaataaggctagtccgttatcaacttgaaaaagtggcaccgagtcggtgcggcagacttctcgtcaggagtcagatgcacc

SEQ ID NO: 19905 - DNA, 126 bp, synthetic construct
  source 1..126: mol_type = other DNA
catggtgcatctgactcctggttttagagctagaaatagcaagttaaaataaggctagtccgttatcaacttgaaaaagtggcaccgagtcggtgcggcagacttctcgtcaggagtcagatgcac

SEQ ID NO: 19906 - DNA, 125 bp, synthetic construct
  source 1..125: mol_type = other DNA
catggtgcatctgactcctggttttagagctagaaatagcaagttaaaataaggctagtccgttatcaacttgaaaaagtggcaccgagtcggtgcggcagacttctcgtcaggagtcagatgca

SEQ ID NO: 19907 - DNA, 124 bp, synthetic construct
  source 1..124: mol_type = other DNA
catggtgcatctgactcctggttttagagctagaaatagcaagttaaaataaggctagtccgttatcaacttgaaaaagtggcaccgagtcggtgcggcagacttctcgtcaggagtcagatgc

SEQ ID NO: 19908 - DNA, 123 bp, synthetic construct
  source 1..123: mol_type = other DNA
catggtgcatctgactcctggttttagagctagaaatagcaagttaaaataaggctagtccgttatcaacttgaaaaagtggcaccgagtcggtgcggcagacttctcgtcaggagtcagatg

SEQ ID NO: 19909 - DNA, 122 bp, synthetic construct
  source 1..122: mol_type = other DNA
catggtgcatctgactcctggttttagagctagaaatagcaagttaaaataaggctagtccgttatcaacttgaaaaagtggcaccgagtcggtgcggcagacttctcgtcaggagtcagat

SEQ ID NO: 19910 - DNA, 121 bp, synthetic construct
  source 1..121: mol_type = other DNA
catggtgcatctgactcctggttttagagctagaaatagcaagttaaaataaggctagtccgttatcaacttgaaaaagtggcaccgagtcggtgcggcagacttctcgtcaggagtcaga

SEQ ID NO: 19911 - DNA, 129 bp, synthetic construct
  source 1..129: mol_type = other DNA
catggtgcatctgactcctggttttagagctagaaatagcaagttaaaataaggctagtccgttatcaacttgaaaaagtggcaccgagtcggtgcgcagacttctcgtcaggagtcagatgcaccatg

SEQ ID NO: 19912 - DNA, 128 bp, synthetic construct
  source 1..128: mol_type = other DNA
catggtgcatctgactcctggttttagagctagaaatagcaagttaaaataaggctagtccgttatcaacttgaaaaagtggcaccgagtcggtgcgcagacttctcgtcaggagtcagatgcaccat

SEQ ID NO: 19913 - DNA, 127 bp, synthetic construct
  source 1..127: mol_type = other DNA
catggtgcatctgactcctggttttagagctagaaatagcaagttaaaataaggctagtccgttatcaacttgaaaaagtggcaccgagtcggtgcgcagacttctcgtcaggagtcagatgcacca

SEQ ID NO: 19914 - DNA, 126 bp, synthetic construct
  source 1..126: mol_type = other DNA
catggtgcatctgactcctggttttagagctagaaatagcaagttaaaataaggctagtccgttatcaacttgaaaaagtggcaccgagtcggtgcgcagacttctcgtcaggagtcagatgcacc

SEQ ID NO: 19915 - DNA, 125 bp, synthetic construct
  source 1..125: mol_type = other DNA
catggtgcatctgactcctggttttagagctagaaatagcaagttaaaataaggctagtccgttatcaacttgaaaaagtggcaccgagtcggtgcgcagacttctcgtcaggagtcagatgcac

SEQ ID NO: 19916 - DNA, 124 bp, synthetic construct
  source 1..124: mol_type = other DNA
catggtgcatctgactcctggttttagagctagaaatagcaagttaaaataaggctagtccgttatcaacttgaaaaagtggcaccgagtcggtgcgcagacttctcgtcaggagtcagatgca

SEQ ID NO: 19917 - DNA, 123 bp, synthetic construct
  source 1..123: mol_type = other DNA
catggtgcatctgactcctggttttagagctagaaatagcaagttaaaataaggctagtccgttatcaacttgaaaaagtggcaccgagtcggtgcgcagacttctcgtcaggagtcagatgc

SEQ ID NO: 19918 - DNA, 122 bp, synthetic construct
  source 1..122: mol_type = other DNA
catggtgcatctgactcctggttttagagctagaaatagcaagttaaaataaggctagtccgttatcaacttgaaaaagtggcaccgagtcggtgcgcagacttctcgtcaggagtcagatg

SEQ ID NO: 19919 - DNA, 121 bp, synthetic construct
  source 1..121: mol_type = other DNA
catggtgcatctgactcctggttttagagctagaaatagcaagttaaaataaggctagtccgttatcaacttgaaaaagtggcaccgagtcggtgcgcagacttctcgtcaggagtcagat

SEQ ID NO: 19920 - DNA, 120 bp, synthetic construct
  source 1..120: mol_type = other DNA
catggtgcatctgactcctggttttagagctagaaatagcaagttaaaataaggctagtccgttatcaacttgaaaaagtggcaccgagtcggtgcgcagacttctcgtcaggagtcaga

SEQ ID NO: 19921 - DNA, 127 bp, synthetic construct
  source 1..127: mol_type = other DNA
catggtgcatctgactcctggttttagagctagaaatagcaagttaaaataaggctagtccgttatcaacttgaaaaagtggcaccgagtcggtgcagacttctcgtcaggagtcagatgcaccatg

SEQ ID NO: 19922 - DNA, 126 bp, synthetic construct
  source 1..126: mol_type = other DNA
catggtgcatctgactcctggttttagagctagaaatagcaagttaaaataaggctagtccgttatcaacttgaaaaagtggcaccgagtcggtgcagacttctcgtcaggagtcagatgcaccat

SEQ ID NO: 19923 - DNA, 125 bp, synthetic construct
  source 1..125: mol_type = other DNA
catggtgcatctgactcctggttttagagctagaaatagcaagttaaaataaggctagtccgttatcaacttgaaaaagtggcaccgagtcggtgcagacttctcgtcaggagtcagatgcacca

SEQ ID NO: 19924 - DNA, 124 bp, synthetic construct
  source 1..124: mol_type = other DNA
catggtgcatctgactcctggttttagagctagaaatagcaagttaaaataaggctagtccgttatcaacttgaaaaagtggcaccgagtcggtgcagacttctcgtcaggagtcagatgcacc

SEQ ID NO: 19925 - DNA, 123 bp, synthetic construct
  source 1..123: mol_type = other DNA
catggtgcatctgactcctggttttagagctagaaatagcaagttaaaataaggctagtccgttatcaacttgaaaaagtggcaccgagtcggtgcagacttctcgtcaggagtcagatgcac

SEQ ID NO: 19926 - DNA, 122 bp, synthetic construct
  source 1..122: mol_type = other DNA
catggtgcatctgactcctggttttagagctagaaatagcaagttaaaataaggctagtccgttatcaacttgaaaaagtggcaccgagtcggtgcagacttctcgtcaggagtcagatgca

SEQ ID NO: 19927 - DNA, 121 bp, synthetic construct
  source 1..121: mol_type = other DNA
catggtgcatctgactcctggttttagagctagaaatagcaagttaaaataaggctagtccgttatcaacttgaaaaagtggcaccgagtcggtgcagacttctcgtcaggagtcagatgc

SEQ ID NO: 19928 - DNA, 120 bp, synthetic construct
  source 1..120: mol_type = other DNA
catggtgcatctgactcctggttttagagctagaaatagcaagttaaaataaggctagtccgttatcaacttgaaaaagtggcaccgagtcggtgcagacttctcgtcaggagtcagatg

SEQ ID NO: 19929 - DNA, 119 bp, synthetic construct
  source 1..119: mol_type = other DNA
catggtgcatctgactcctggttttagagctagaaatagcaagttaaaataaggctagtccgttatcaacttgaaaaagtggcaccgagtcggtgcagacttctcgtcaggagtcagat

SEQ ID NO: 19930 - DNA, 118 bp, synthetic construct
  source 1..118: mol_type = other DNA
catggtgcatctgactcctggttttagagctagaaatagcaagttaaaataaggctagtccgttatcaacttgaaaaagtggcaccgagtcggtgcagacttctcgtcaggagtcaga

SEQ ID NO: 19931 - DNA, 126 bp, synthetic construct
  source 1..126: mol_type = other DNA
catggtgcatctgactcctggttttagagctagaaatagcaagttaaaataaggctagtccgttatcaacttgaaaaagtggcaccgagtcggtgcgacttctcgtcaggagtcagatgcaccatg

SEQ ID NO: 19932 - DNA, 125 bp, synthetic construct
  source 1..125: mol_type = other DNA
catggtgcatctgactcctggttttagagctagaaatagcaagttaaaataaggctagtccgttatcaacttgaaaaagtggcaccgagtcggtgcgacttctcgtcaggagtcagatgcaccat

SEQ ID NO: 19933 - DNA, 124 bp, synthetic construct
  source 1..124: mol_type = other DNA
catggtgcatctgactcctggttttagagctagaaatagcaagttaaaataaggctagtccgttatcaacttgaaaaagtggcaccgagtcggtgcgacttctcgtcaggagtcagatgcacca

SEQ ID NO: 19934 - DNA, 123 bp, synthetic construct
  source 1..123: mol_type = other DNA
catggtgcatctgactcctggttttagagctagaaatagcaagttaaaataaggctagtccgttatcaacttgaaaaagtggcaccgagtcggtgcgacttctcgtcaggagtcagatgcacc

SEQ ID NO: 19935 - DNA, 122 bp, synthetic construct
  source 1..122: mol_type = other DNA
catggtgcatctgactcctggttttagagctagaaatagcaagttaaaataaggctagtccgttatcaacttgaaaaagtggcaccgagtcggtgcgacttctcgtcaggagtcagatgcac

SEQ ID NO: 19936 - DNA, 121 bp, synthetic construct
  source 1..121: mol_type = other DNA
catggtgcatctgactcctggttttagagctagaaatagcaagttaaaataaggctagtccgttatcaacttgaaaaagtggcaccgagtcggtgcgacttctcgtcaggagtcagatgca

SEQ ID NO: 19937 - DNA, 120 bp, synthetic construct
  source 1..120: mol_type = other DNA
catggtgcatctgactcctggttttagagctagaaatagcaagttaaaataaggctagtccgttatcaacttgaaaaagtggcaccgagtcggtgcgacttctcgtcaggagtcagatgc

SEQ ID NO: 19938 - DNA, 119 bp, synthetic construct
  source 1..119: mol_type = other DNA
catggtgcatctgactcctggttttagagctagaaatagcaagttaaaataaggctagtccgttatcaacttgaaaaagtggcaccgagtcggtgcgacttctcgtcaggagtcagatg

SEQ ID NO: 19939 - DNA, 118 bp, synthetic construct
  source 1..118: mol_type = other DNA
catggtgcatctgactcctggttttagagctagaaatagcaagttaaaataaggctagtccgttatcaacttgaaaaagtggcaccgagtcggtgcgacttctcgtcaggagtcagat

SEQ ID NO: 19940 - DNA, 117 bp, synthetic construct
  source 1..117: mol_type = other DNA
catggtgcatctgactcctggttttagagctagaaatagcaagttaaaataaggctagtccgttatcaacttgaaaaagtggcaccgagtcggtgcgacttctcgtcaggagtcaga

SEQ ID NO: 19941 - DNA, 125 bp, synthetic construct
  source 1..125: mol_type = other DNA
catggtgcatctgactcctggttttagagctagaaatagcaagttaaaataaggctagtccgttatcaacttgaaaaagtggcaccgagtcggtgcacttctcgtcaggagtcagatgcaccatg

SEQ ID NO: 19942 - DNA, 124 bp, synthetic construct
  source 1..124: mol_type = other DNA
catggtgcatctgactcctggttttagagctagaaatagcaagttaaaataaggctagtccgttatcaacttgaaaaagtggcaccgagtcggtgcacttctcgtcaggagtcagatgcaccat

SEQ ID NO: 19943 - DNA, 123 bp, synthetic construct
  source 1..123: mol_type = other DNA
catggtgcatctgactcctggttttagagctagaaatagcaagttaaaataaggctagtccgttatcaacttgaaaaagtggcaccgagtcggtgcacttctcgtcaggagtcagatgcacca

SEQ ID NO: 19944 - DNA, 122 bp, synthetic construct
  source 1..122: mol_type = other DNA
catggtgcatctgactcctggttttagagctagaaatagcaagttaaaataaggctagtccgttatcaacttgaaaaagtggcaccgagtcggtgcacttctcgtcaggagtcagatgcacc

SEQ ID NO: 19945 - DNA, 121 bp, synthetic construct
  source 1..121: mol_type = other DNA
catggtgcatctgactcctggttttagagctagaaatagcaagttaaaataaggctagtccgttatcaacttgaaaaagtggcaccgagtcggtgcacttctcgtcaggagtcagatgcac

SEQ ID NO: 19946 - DNA, 120 bp, synthetic construct
  source 1..120: mol_type = other DNA
catggtgcatctgactcctggttttagagctagaaatagcaagttaaaataaggctagtccgttatcaacttgaaaaagtggcaccgagtcggtgcacttctcgtcaggagtcagatgca

SEQ ID NO: 19947 - DNA, 119 bp, synthetic construct
  source 1..119: mol_type = other DNA
catggtgcatctgactcctggttttagagctagaaatagcaagttaaaataaggctagtccgttatcaacttgaaaaagtggcaccgagtcggtgcacttctcgtcaggagtcagatgc

SEQ ID NO: 19948 - DNA, 118 bp, synthetic construct
  source 1..118: mol_type = other DNA
catggtgcatctgactcctggttttagagctagaaatagcaagttaaaataaggctagtccgttatcaacttgaaaaagtggcaccgagtcggtgcacttctcgtcaggagtcagatg

SEQ ID NO: 19949 - DNA, 117 bp, synthetic construct
  source 1..117: mol_type = other DNA
catggtgcatctgactcctggttttagagctagaaatagcaagttaaaataaggctagtccgttatcaacttgaaaaagtggcaccgagtcggtgcacttctcgtcaggagtcagat

SEQ ID NO: 19950 - DNA, 116 bp, synthetic construct
  source 1..116: mol_type = other DNA
catggtgcatctgactcctggttttagagctagaaatagcaagttaaaataaggctagtccgttatcaacttgaaaaagtggcaccgagtcggtgcacttctcgtcaggagtcaga

SEQ ID NO: 19951 - DNA, 123 bp, synthetic construct
  source 1..123: mol_type = other DNA
catggtgcatctgactcctggttttagagctagaaatagcaagttaaaataaggctagtccgttatcaacttgaaaaagtggcaccgagtcggtgcttctcgtcaggagtcagatgcaccatg

SEQ ID NO: 19952 - DNA, 122 bp, synthetic construct
  source 1..122: mol_type = other DNA
catggtgcatctgactcctggttttagagctagaaatagcaagttaaaataaggctagtccgttatcaacttgaaaaagtggcaccgagtcggtgcttctcgtcaggagtcagatgcaccat

SEQ ID NO: 19953 - DNA, 121 bp, synthetic construct
  source 1..121: mol_type = other DNA
catggtgcatctgactcctggttttagagctagaaatagcaagttaaaataaggctagtccgttatcaacttgaaaaagtggcaccgagtcggtgcttctcgtcaggagtcagatgcacca

SEQ ID NO: 19954 - DNA, 120 bp, synthetic construct
  source 1..120: mol_type = other DNA
catggtgcatctgactcctggttttagagctagaaatagcaagttaaaataaggctagtccgttatcaacttgaaaaagtggcaccgagtcggtgcttctcgtcaggagtcagatgcacc

SEQ ID NO: 19955 - DNA, 119 bp, synthetic construct
  source 1..119: mol_type = other DNA
catggtgcatctgactcctggttttagagctagaaatagcaagttaaaataaggctagtccgttatcaacttgaaaaagtggcaccgagtcggtgcttctcgtcaggagtcagatgcac

SEQ ID NO: 19956 - DNA, 118 bp, synthetic construct
  source 1..118: mol_type = other DNA
catggtgcatctgactcctggttttagagctagaaatagcaagttaaaataaggctagtccgttatcaacttgaaaaagtggcaccgagtcggtgcttctcgtcaggagtcagatgca

SEQ ID NO: 19957 - DNA, 117 bp, synthetic construct
  source 1..117: mol_type = other DNA
catggtgcatctgactcctggttttagagctagaaatagcaagttaaaataaggctagtccgttatcaacttgaaaaagtggcaccgagtcggtgcttctcgtcaggagtcagatgc

SEQ ID NO: 19958 - DNA, 116 bp, synthetic construct
  source 1..116: mol_type = other DNA
catggtgcatctgactcctggttttagagctagaaatagcaagttaaaataaggctagtccgttatcaacttgaaaaagtggcaccgagtcggtgcttctcgtcaggagtcagatg

SEQ ID NO: 19959 - DNA, 115 bp, synthetic construct
  source 1..115: mol_type = other DNA
catggtgcatctgactcctggttttagagctagaaatagcaagttaaaataaggctagtccgttatcaacttgaaaaagtggcaccgagtcggtgcttctcgtcaggagtcagat

SEQ ID NO: 19960 - DNA, 114 bp, synthetic construct
  source 1..114: mol_type = other DNA
catggtgcatctgactcctggttttagagctagaaatagcaagttaaaataaggctagtccgttatcaacttgaaaaagtggcaccgagtcggtgcttctcgtcaggagtcaga

SEQ ID NO: 19961 - DNA, 122 bp, synthetic construct
  source 1..122: mol_type = other DNA
catggtgcatctgactcctggttttagagctagaaatagcaagttaaaataaggctagtccgttatcaacttgaaaaagtggcaccgagtcggtgctctcgtcaggagtcagatgcaccatg

SEQ ID NO: 19962 - DNA, 121 bp, synthetic construct
  source 1..121: mol_type = other DNA
catggtgcatctgactcctggttttagagctagaaatagcaagttaaaataaggctagtccgttatcaacttgaaaaagtggcaccgagtcggtgctctcgtcaggagtcagatgcaccat

SEQ ID NO: 19963 - DNA, 120 bp, synthetic construct
  source 1..120: mol_type = other DNA
catggtgcatctgactcctggttttagagctagaaatagcaagttaaaataaggctagtccgttatcaacttgaaaaagtggcaccgagtcggtgctctcgtcaggagtcagatgcacca

SEQ ID NO: 19964 - DNA, 119 bp, synthetic construct
  source 1..119: mol_type = other DNA
catggtgcatctgactcctggttttagagctagaaatagcaagttaaaataaggctagtccgttatcaacttgaaaaagtggcaccgagtcggtgctctcgtcaggagtcagatgcacc

SEQ ID NO: 19965 - DNA, 118 bp, synthetic construct
  source 1..118: mol_type = other DNA
catggtgcatctgactcctggttttagagctagaaatagcaagttaaaataaggctagtccgttatcaacttgaaaaagtggcaccgagtcggtgctctcgtcaggagtcagatgcac

SEQ ID NO: 19966 - DNA, 117 bp, synthetic construct
  source 1..117: mol_type = other DNA
catggtgcatctgactcctggttttagagctagaaatagcaagttaaaataaggctagtccgttatcaacttgaaaaagtggcaccgagtcggtgctctcgtcaggagtcagatgca

SEQ ID NO: 19967 - DNA, 116 bp, synthetic construct
  source 1..116: mol_type = other DNA
catggtgcatctgactcctggttttagagctagaaatagcaagttaaaataaggctagtccgttatcaacttgaaaaagtggcaccgagtcggtgctctcgtcaggagtcagatgc

SEQ ID NO: 19968 - DNA, 115 bp, synthetic construct
  source 1..115: mol_type = other DNA
catggtgcatctgactcctggttttagagctagaaatagcaagttaaaataaggctagtccgttatcaacttgaaaaagtggcaccgagtcggtgctctcgtcaggagtcagatg

SEQ ID NO: 19969 - DNA, 114 bp, synthetic construct
  source 1..114: mol_type = other DNA
catggtgcatctgactcctggttttagagctagaaatagcaagttaaaataaggctagtccgttatcaacttgaaaaagtggcaccgagtcggtgctctcgtcaggagtcagat

SEQ ID NO: 19970 - DNA, 113 bp, synthetic construct
  source 1..113: mol_type = other DNA
catggtgcatctgactcctggttttagagctagaaatagcaagttaaaataaggctagtccgttatcaacttgaaaaagtggcaccgagtcggtgctctcgtcaggagtcaga

SEQ ID NO: 19971 - DNA, 20 bp, synthetic construct
  source 1..20: mol_type = other DNA
gtaacggcagacttctccac

SEQ ID NO: 19972 - DNA, 20 bp, synthetic construct
  source 1..20: mol_type = other DNA
gtaacggcagacttctccac

SEQ ID NO: 19973 - DNA, 20 bp, synthetic construct
  source 1..20: mol_type = other DNA
gtaacggcagacttctccac

SEQ ID NO: 19974 - DNA, 20 bp, synthetic construct
  source 1..20: mol_type = other DNA
gtaacggcagacttctccac

SEQ ID NO: 19975 - DNA, 20 bp, synthetic construct
  source 1..20: mol_type = other DNA
gtaacggcagacttctccac

SEQ ID NO: 19976 - DNA, 20 bp, synthetic construct
  source 1..20: mol_type = other DNA
gtaacggcagacttctccac

SEQ ID NO: 19977 - DNA, 20 bp, synthetic construct
  source 1..20: mol_type = other DNA
gtaacggcagacttctccac

SEQ ID NO: 19978 - DNA, 20 bp, synthetic construct
  source 1..20: mol_type = other DNA
gtaacggcagacttctccac

SEQ ID NO: 19979 - DNA, 20 bp, synthetic construct
  source 1..20: mol_type = other DNA
gtaacggcagacttctccac

SEQ ID NO: 19980 - DNA, 20 bp, synthetic construct
  source 1..20: mol_type = other DNA
gtaacggcagacttctccac

SEQ ID NO: 19981 - DNA, 20 bp, synthetic construct
  source 1..20: mol_type = other DNA
gtaacggcagacttctccac

SEQ ID NO: 19982 - DNA, 20 bp, synthetic construct
  source 1..20: mol_type = other DNA
gtaacggcagacttctccac

SEQ ID NO: 19983 - DNA, 20 bp, synthetic construct
  source 1..20: mol_type = other DNA
gtaacggcagacttctccac

SEQ ID NO: 19984 - DNA, 20 bp, synthetic construct
  source 1..20: mol_type = other DNA
gtaacggcagacttctccac

SEQ ID NO: 19985 - DNA, 20 bp, synthetic construct
  source 1..20: mol_type = other DNA
gtaacggcagacttctccac

SEQ ID NO: 19986 - DNA, 20 bp, synthetic construct
  source 1..20: mol_type = other DNA
gtaacggcagacttctccac

SEQ ID NO: 19987 - DNA, 20 bp, synthetic construct
  source 1..20: mol_type = other DNA
gtaacggcagacttctccac

SEQ ID NO: 19988 - DNA, 20 bp, synthetic construct
  source 1..20: mol_type = other DNA
gtaacggcagacttctccac

SEQ ID NO: 19989 - DNA, 20 bp, synthetic construct
  source 1..20: mol_type = other DNA
gtaacggcagacttctccac

SEQ ID NO: 19990 - DNA, 20 bp, synthetic construct
  source 1..20: mol_type = other DNA
gtaacggcagacttctccac

SEQ ID NO: 19991 - DNA, 20 bp, synthetic construct
  source 1..20: mol_type = other DNA
gtaacggcagacttctccac

SEQ ID NO: 19992 - DNA, 20 bp, synthetic construct
  source 1..20: mol_type = other DNA
gtaacggcagacttctccac

SEQ ID NO: 19993 - DNA, 20 bp, synthetic construct
  source 1..20: mol_type = other DNA
gtaacggcagacttctccac

SEQ ID NO: 19994 - DNA, 20 bp, synthetic construct
  source 1..20: mol_type = other DNA
gtaacggcagacttctccac

SEQ ID NO: 19995 - DNA, 20 bp, synthetic construct
  source 1..20: mol_type = other DNA
gtaacggcagacttctccac

SEQ ID NO: 19996 - DNA, 20 bp, synthetic construct
  source 1..20: mol_type = other DNA
gtaacggcagacttctccac

SEQ ID NO: 19997 - DNA, 20 bp, synthetic construct
  source 1..20: mol_type = other DNA
gtaacggcagacttctccac

SEQ ID NO: 19998 - DNA, 20 bp, synthetic construct
  source 1..20: mol_type = other DNA
gtaacggcagacttctccac

SEQ ID NO: 19999 - DNA, 20 bp, synthetic construct
  source 1..20: mol_type = other DNA
gtaacggcagacttctccac

SEQ ID NO: 20000 - DNA, 20 bp, synthetic construct
  source 1..20: mol_type = other DNA
gtaacggcagacttctccac

SEQ ID NO: 20001 - DNA, 20 bp, synthetic construct
  source 1..20: mol_type = other DNA
gtaacggcagacttctccac

SEQ ID NO: 20002 - DNA, 20 bp, synthetic construct
  source 1..20: mol_type = other DNA
gtaacggcagacttctccac

SEQ ID NO: 20003 - DNA, 20 bp, synthetic construct
  source 1..20: mol_type = other DNA
gtaacggcagacttctccac

SEQ ID NO: 20004 - DNA, 20 bp, synthetic construct
  source 1..20: mol_type = other DNA
gtaacggcagacttctccac

SEQ ID NO: 20005 - DNA, 20 bp, synthetic construct
  source 1..20: mol_type = other DNA
gtaacggcagacttctccac

SEQ ID NO: 20006 - DNA, 20 bp, synthetic construct
  source 1..20: mol_type = other DNA
gtaacggcagacttctccac

SEQ ID NO: 20007 - DNA, 20 bp, synthetic construct
  source 1..20: mol_type = other DNA
gtaacggcagacttctccac

SEQ ID NO: 20008 - DNA, 20 bp, synthetic construct
  source 1..20: mol_type = other DNA
gtaacggcagacttctccac

SEQ ID NO: 20009 - DNA, 20 bp, synthetic construct
  source 1..20: mol_type = other DNA
gtaacggcagacttctccac

SEQ ID NO: 20010 - DNA, 20 bp, synthetic construct
  source 1..20: mol_type = other DNA
gtaacggcagacttctccac

SEQ ID NO: 20011 - DNA, 20 bp, synthetic construct
  source 1..20: mol_type = other DNA
gtaacggcagacttctccac

SEQ ID NO: 20012 - DNA, 20 bp, synthetic construct
  source 1..20: mol_type = other DNA
gtaacggcagacttctccac

SEQ ID NO: 20013 - DNA, 20 bp, synthetic construct
  source 1..20: mol_type = other DNA
gtaacggcagacttctccac

SEQ ID NO: 20014 - DNA, 20 bp, synthetic construct
  source 1..20: mol_type = other DNA
gtaacggcagacttctccac

SEQ ID NO: 20015 - DNA, 20 bp, synthetic construct
  source 1..20: mol_type = other DNA
gtaacggcagacttctccac

SEQ ID NO: 20016 - DNA, 20 bp, synthetic construct
  source 1..20: mol_type = other DNA
gtaacggcagacttctccac

SEQ ID NO: 20017 - DNA, 20 bp, synthetic construct
  source 1..20: mol_type = other DNA
gtaacggcagacttctccac

SEQ ID NO: 20018 - DNA, 20 bp, synthetic construct
  source 1..20: mol_type = other DNA
gtaacggcagacttctccac

SEQ ID NO: 20019 - DNA, 20 bp, synthetic construct
  source 1..20: mol_type = other DNA
gtaacggcagacttctccac

SEQ ID NO: 20020 - DNA, 20 bp, synthetic construct
  source 1..20: mol_type = other DNA
gtaacggcagacttctccac

SEQ ID NO: 20021 - DNA, 20 bp, synthetic construct
  source 1..20: mol_type = other DNA
gtaacggcagacttctccac

SEQ ID NO: 20022 - DNA, 20 bp, synthetic construct
  source 1..20: mol_type = other DNA
gtaacggcagacttctccac

SEQ ID NO: 20023 - DNA, 20 bp, synthetic construct
  source 1..20: mol_type = other DNA
gtaacggcagacttctccac

SEQ ID NO: 20024 - DNA, 20 bp, synthetic construct
  source 1..20: mol_type = other DNA
gtaacggcagacttctccac

SEQ ID NO: 20025 - DNA, 20 bp, synthetic construct
  source 1..20: mol_type = other DNA
gtaacggcagacttctccac

SEQ ID NO: 20026 - DNA, 20 bp, synthetic construct
  source 1..20: mol_type = other DNA
gtaacggcagacttctccac

SEQ ID NO: 20027 - DNA, 20 bp, synthetic construct
  source 1..20: mol_type = other DNA
gtaacggcagacttctccac

SEQ ID NO: 20028 - DNA, 20 bp, synthetic construct
  source 1..20: mol_type = other DNA
gtaacggcagacttctccac

SEQ ID NO: 20029 - DNA, 20 bp, synthetic construct
  source 1..20: mol_type = other DNA
gtaacggcagacttctccac

SEQ ID NO: 20030 - DNA, 20 bp, synthetic construct
  source 1..20: mol_type = other DNA
gtaacggcagacttctccac

SEQ ID NO: 20031 - DNA, 20 bp, synthetic construct
  source 1..20: mol_type = other DNA
gtaacggcagacttctccac

SEQ ID NO: 20032 - DNA, 20 bp, synthetic construct
  source 1..20: mol_type = other DNA
gtaacggcagacttctccac

SEQ ID NO: 20033 - DNA, 20 bp, synthetic construct
  source 1..20: mol_type = other DNA
gtaacggcagacttctccac

SEQ ID NO: 20034 - DNA, 20 bp, synthetic construct
  source 1..20: mol_type = other DNA
gtaacggcagacttctccac

SEQ ID NO: 20035 - DNA, 20 bp, synthetic construct
  source 1..20: mol_type = other DNA
gtaacggcagacttctccac

SEQ ID NO: 20036 - DNA, 20 bp, synthetic construct
  source 1..20: mol_type = other DNA
gtaacggcagacttctccac

SEQ ID NO: 20037 - DNA, 20 bp, synthetic construct
  source 1..20: mol_type = other DNA
gtaacggcagacttctccac

SEQ ID NO: 20038 - DNA, 20 bp, synthetic construct
  source 1..20: mol_type = other DNA
gtaacggcagacttctccac

SEQ ID NO: 20039 - DNA, 20 bp, synthetic construct
  source 1..20: mol_type = other DNA
gtaacggcagacttctccac

SEQ ID NO: 20040 - DNA, 20 bp, synthetic construct
  source 1..20: mol_type = other DNA
gtaacggcagacttctccac

SEQ ID NO: 20041 - DNA, 20 bp, synthetic construct
  source 1..20: mol_type = other DNA
gtaacggcagacttctccac

SEQ ID NO: 20042 - DNA, 20 bp, synthetic construct
  source 1..20: mol_type = other DNA
gtaacggcagacttctccac

SEQ ID NO: 20043 - DNA, 20 bp, synthetic construct
  source 1..20: mol_type = other DNA
gtaacggcagacttctccac

SEQ ID NO: 20044 - DNA, 20 bp, synthetic construct
  source 1..20: mol_type = other DNA
gtaacggcagacttctccac

SEQ ID NO: 20045 - DNA, 20 bp, synthetic construct
  source 1..20: mol_type = other DNA
gtaacggcagacttctccac

SEQ ID NO: 20046 - DNA, 20 bp, synthetic construct
  source 1..20: mol_type = other DNA
gtaacggcagacttctccac

SEQ ID NO: 20047 - DNA, 20 bp, synthetic construct
  source 1..20: mol_type = other DNA
gtaacggcagacttctccac

SEQ ID NO: 20048 - DNA, 20 bp, synthetic construct
  source 1..20: mol_type = other DNA
gtaacggcagacttctccac

SEQ ID NO: 20049 - DNA, 20 bp, synthetic construct
  source 1..20: mol_type = other DNA
gtaacggcagacttctccac

SEQ ID NO: 20050 - DNA, 20 bp, synthetic construct
  source 1..20: mol_type = other DNA
gtaacggcagacttctccac

SEQ ID NO: 20051 - DNA, 20 bp, synthetic construct
  source 1..20: mol_type = other DNA
gtaacggcagacttctccac

SEQ ID NO: 20052 - DNA, 20 bp, synthetic construct
  source 1..20: mol_type = other DNA
gtaacggcagacttctccac

SEQ ID NO: 20053 - DNA, 20 bp, synthetic construct
  source 1..20: mol_type = other DNA
gtaacggcagacttctccac

SEQ ID NO: 20054 - DNA, 20 bp, synthetic construct
  source 1..20: mol_type = other DNA
gtaacggcagacttctccac

SEQ ID NO: 20055 - DNA, 20 bp, synthetic construct
  source 1..20: mol_type = other DNA
gtaacggcagacttctccac

SEQ ID NO: 20056 - DNA, 20 bp, synthetic construct
  source 1..20: mol_type = other DNA
gtaacggcagacttctccac

SEQ ID NO: 20057 - DNA, 20 bp, synthetic construct
  source 1..20: mol_type = other DNA
gtaacggcagacttctccac

SEQ ID NO: 20058 - DNA, 20 bp, synthetic construct
  source 1..20: mol_type = other DNA
gtaacggcagacttctccac

SEQ ID NO: 20059 - DNA, 20 bp, synthetic construct
  source 1..20: mol_type = other DNA
gtaacggcagacttctccac

SEQ ID NO: 20060 - DNA, 20 bp, synthetic construct
  source 1..20: mol_type = other DNA
gtaacggcagacttctccac

SEQ ID NO: 20061 - DNA, 76 bp, synthetic construct; identical to SEQ ID NO: 11012
  source 1..76: mol_type = other DNA

SEQ ID NO: 20062 - DNA, 76 bp, synthetic construct; identical to SEQ ID NO: 11012
  source 1..76: mol_type = other DNA

SEQ ID NO: 20063 - DNA, 76 bp, synthetic construct; identical to SEQ ID NO: 11012
  source 1..76: mol_type = other DNA

SEQ ID NO: 20064 - DNA, 76 bp, synthetic construct; identical to SEQ ID NO: 11012
  source 1..76: mol_type = other DNA

SEQ ID NO: 20065 - DNA, 76 bp, synthetic construct; identical to SEQ ID NO: 11012
  source 1..76: mol_type = other DNA

SEQ ID NO: 20066 - DNA, 76 bp, synthetic construct; identical to SEQ ID NO: 11012
  source 1..76: mol_type = other DNA

SEQ ID NO: 20067 - DNA, 76 bp, synthetic construct; identical to SEQ ID NO: 11012
  source 1..76: mol_type = other DNA

SEQ ID NO: 20068 - DNA, 76 bp, synthetic construct; identical to SEQ ID NO: 11012
  source 1..76: mol_type = other DNA

SEQ ID NO: 20069 - DNA, 76 bp, synthetic construct; identical to SEQ ID NO: 11012
  source 1..76: mol_type = other DNA

SEQ ID NO: 20070 - DNA, 76 bp, synthetic construct; identical to SEQ ID NO: 11012
  source 1..76: mol_type = other DNA

SEQ ID NO: 20071 - DNA, 76 bp, synthetic construct; identical to SEQ ID NO: 11012
  source 1..76: mol_type = other DNA

SEQ ID NO: 20072 - DNA, 76 bp, synthetic construct; identical to SEQ ID NO: 11012
  source 1..76: mol_type = other DNA

SEQ ID NO: 20073 - DNA, 76 bp, synthetic construct; identical to SEQ ID NO: 11012
  source 1..76: mol_type = other DNA

SEQ ID NO: 20074 - DNA, 76 bp, synthetic construct; identical to SEQ ID NO: 11012
  source 1..76: mol_type = other DNA

SEQ ID NO: 20075 - DNA, 76 bp, synthetic construct; identical to SEQ ID NO: 11012
  source 1..76: mol_type = other DNA

SEQ ID NO: 20076 - DNA, 76 bp, synthetic construct; identical to SEQ ID NO: 11012
  source 1..76: mol_type = other DNA

SEQ ID NO: 20077 - DNA, 76 bp, synthetic construct; identical to SEQ ID NO: 11012
  source 1..76: mol_type = other DNA

SEQ ID NO: 20078 - DNA, 76 bp, synthetic construct; identical to SEQ ID NO: 11012
  source 1..76: mol_type = other DNA

SEQ ID NO: 20079 - DNA, 76 bp, synthetic construct; identical to SEQ ID NO: 11012
  source 1..76: mol_type = other DNA

SEQ ID NO: 20080 - DNA, 76 bp, synthetic construct; identical to SEQ ID NO: 11012
  source 1..76: mol_type = other DNA

SEQ ID NO: 20081 - DNA, 76 bp, synthetic construct; identical to SEQ ID NO: 11012
  source 1..76: mol_type = other DNA

SEQ ID NO: 20082 - DNA, 76 bp, synthetic construct; identical to SEQ ID NO: 11012
  source 1..76: mol_type = other DNA

SEQ ID NO: 20083 - DNA, 76 bp, synthetic construct; identical to SEQ ID NO: 11012
  source 1..76: mol_type = other DNA

SEQ ID NO: 20084 - DNA, 76 bp, synthetic construct; identical to SEQ ID NO: 11012
  source 1..76: mol_type = other DNA

SEQ ID NO: 20085 - DNA, 76 bp, synthetic construct; identical to SEQ ID NO: 11012
  source 1..76: mol_type = other DNA

SEQ ID NO: 20086 - DNA, 76 bp, synthetic construct; identical to SEQ ID NO: 11012
  source 1..76: mol_type = other DNA

SEQ ID NO: 20087 - DNA, 76 bp, synthetic construct; identical to SEQ ID NO: 11012
  source 1..76: mol_type = other DNA

SEQ ID NO: 20088 - DNA, 76 bp, synthetic construct; identical to SEQ ID NO: 11012
  source 1..76: mol_type = other DNA

SEQ ID NO: 20089 - DNA, 76 bp, synthetic construct; identical to SEQ ID NO: 11012
  source 1..76: mol_type = other DNA

SEQ ID NO: 20090 - DNA, 76 bp, synthetic construct; identical to SEQ ID NO: 11012
  source 1..76: mol_type = other DNA

SEQ ID NO: 20091 - DNA, 76 bp, synthetic construct; identical to SEQ ID NO: 11012
  source 1..76: mol_type = other DNA

SEQ ID NO: 20092 - DNA, 76 bp, synthetic construct; identical to SEQ ID NO: 11012
  source 1..76: mol_type = other DNA

SEQ ID NO: 20093 - DNA, 76 bp, synthetic construct; identical to SEQ ID NO: 11012
  source 1..76: mol_type = other DNA

SEQ ID NO: 20094 - DNA, 76 bp, synthetic construct; identical to SEQ ID NO: 11012
  source 1..76: mol_type = other DNA

SEQ ID NO: 20095 - DNA, 76 bp, synthetic construct; identical to SEQ ID NO: 11012
  source 1..76: mol_type = other DNA

SEQ ID NO: 20096 - DNA, 76 bp, synthetic construct; identical to SEQ ID NO: 11012
  source 1..76: mol_type = other DNA

SEQ ID NO: 20097 - DNA, 76 bp, synthetic construct; identical to SEQ ID NO: 11012
  source 1..76: mol_type = other DNA

SEQ ID NO: 20098 - DNA, 76 bp, synthetic construct; identical to SEQ ID NO: 11012
  source 1..76: mol_type = other DNA

SEQ ID NO: 20099 - DNA, 76 bp, synthetic construct; identical to SEQ ID NO: 11012
  source 1..76: mol_type = other DNA

SEQ ID NO: 20100 - DNA, 76 bp, synthetic construct; identical to SEQ ID NO: 11012
  source 1..76: mol_type = other DNA

SEQ ID NO: 20101 - DNA, 76 bp, synthetic construct; identical to SEQ ID NO: 11012
  source 1..76: mol_type = other DNA

SEQ ID NO: 20102 - DNA, 76 bp, synthetic construct; identical to SEQ ID NO: 11012
  source 1..76: mol_type = other DNA

SEQ ID NO: 20103 - DNA, 76 bp, synthetic construct; identical to SEQ ID NO: 11012
  source 1..76: mol_type = other DNA

SEQ ID NO: 20104 - DNA, 76 bp, synthetic construct; identical to SEQ ID NO: 11012
  source 1..76: mol_type = other DNA

SEQ ID NO: 20105 - DNA, 76 bp, synthetic construct; identical to SEQ ID NO: 11012
  source 1..76: mol_type = other DNA

SEQ ID NO: 20106 - DNA, 76 bp, synthetic construct; identical to SEQ ID NO: 11012
  source 1..76: mol_type = other DNA

SEQ ID NO: 20107 - DNA, 76 bp, synthetic construct; identical to SEQ ID NO: 11012
  source 1..76: mol_type = other DNA

SEQ ID NO: 20108 - DNA, 76 bp, synthetic construct; identical to SEQ ID NO: 11012
  source 1..76: mol_type = other DNA

SEQ ID NO: 20109 - DNA, 76 bp, synthetic construct; identical to SEQ ID NO: 11012
  source 1..76: mol_type = other DNA

SEQ ID NO: 20110 - DNA, 76 bp, synthetic construct; identical to SEQ ID NO: 11012
  source 1..76: mol_type = other DNA

SEQ ID NO: 20111 - DNA, 76 bp, synthetic construct; identical to SEQ ID NO: 11012
  source 1..76: mol_type = other DNA

SEQ ID NO: 20112 - DNA, 76 bp, synthetic construct; identical to SEQ ID NO: 11012
  source 1..76: mol_type = other DNA

SEQ ID NO: 20113 - DNA, 76 bp, synthetic construct; identical to SEQ ID NO: 11012
  source 1..76: mol_type = other DNA

SEQ ID NO: 20114 - DNA, 76 bp, synthetic construct; identical to SEQ ID NO: 11012
  source 1..76: mol_type = other DNA

SEQ ID NO: 20115 - DNA, 76 bp, synthetic construct; identical to SEQ ID NO: 11012
  source 1..76: mol_type = other DNA

SEQ ID NO: 20116 - DNA, 76 bp, synthetic construct; identical to SEQ ID NO: 11012
  source 1..76: mol_type = other DNA

SEQ ID NO: 20117 - DNA, 76 bp, synthetic construct; identical to SEQ ID NO: 11012
  source 1..76: mol_type = other DNA

SEQ ID NO: 20118 - DNA, 76 bp, synthetic construct; identical to SEQ ID NO: 11012
  source 1..76: mol_type = other DNA

SEQ ID NO: 20119 - DNA, 76 bp, synthetic construct; identical to SEQ ID NO: 11012
  source 1..76: mol_type = other DNA

SEQ ID NO: 20120 - DNA, 76 bp, synthetic construct; identical to SEQ ID NO: 11012
  source 1..76: mol_type = other DNA

SEQ ID NO: 20121 - DNA, 76 bp, synthetic construct; identical to SEQ ID NO: 11012
  source 1..76: mol_type = other DNA

SEQ ID NO: 20122 - DNA, 76 bp, synthetic construct; identical to SEQ ID NO: 11012
  source 1..76: mol_type = other DNA

SEQ ID NO: 20123 - DNA, 76 bp, synthetic construct; identical to SEQ ID NO: 11012
  source 1..76: mol_type = other DNA

SEQ ID NO: 20124 - DNA, 76 bp, synthetic construct; identical to SEQ ID NO: 11012
  source 1..76: mol_type = other DNA

SEQ ID NO: 20125 - DNA, 76 bp, synthetic construct; identical to SEQ ID NO: 11012
  source 1..76: mol_type = other DNA

SEQ ID NO: 20126 - DNA, 76 bp, synthetic construct; identical to SEQ ID NO: 11012
  source 1..76: mol_type = other DNA

SEQ ID NO: 20127 - DNA, 76 bp, synthetic construct; identical to SEQ ID NO: 11012
  source 1..76: mol_type = other DNA

SEQ ID NO: 20128 - DNA, 76 bp, synthetic construct; identical to SEQ ID NO: 11012
  source 1..76: mol_type = other DNA

SEQ ID NO: 20129 - DNA, 76 bp, synthetic construct; identical to SEQ ID NO: 11012
  source 1..76: mol_type = other DNA

SEQ ID NO: 20130 - DNA, 76 bp, synthetic construct; identical to SEQ ID NO: 11012
  source 1..76: mol_type = other DNA

SEQ ID NO: 20131 - DNA, 76 bp, synthetic construct; identical to SEQ ID NO: 11012
  source 1..76: mol_type = other DNA

SEQ ID NO: 20132 - DNA, 76 bp, synthetic construct; identical to SEQ ID NO: 11012
  source 1..76: mol_type = other DNA

SEQ ID NO: 20133 - DNA, 76 bp, synthetic construct; identical to SEQ ID NO: 11012
  source 1..76: mol_type = other DNA

SEQ ID NO: 20134 - DNA, 76 bp, synthetic construct; identical to SEQ ID NO: 11012
  source 1..76: mol_type = other DNA

SEQ ID NO: 20135 - DNA, 76 bp, synthetic construct; identical to SEQ ID NO: 11012
  source 1..76: mol_type = other DNA

SEQ ID NO: 20136 - DNA, 76 bp, synthetic construct; identical to SEQ ID NO: 11012
  source 1..76: mol_type = other DNA

SEQ ID NO: 20137 - DNA, 76 bp, synthetic construct; identical to SEQ ID NO: 11012
  source 1..76: mol_type = other DNA

SEQ ID NO: 20138 - DNA, 76 bp, synthetic construct; identical to SEQ ID NO: 11012
  source 1..76: mol_type = other DNA

SEQ ID NO: 20139 - DNA, 76 bp, synthetic construct; identical to SEQ ID NO: 11012
  source 1..76: mol_type = other DNA

SEQ ID NO: 20140 - DNA, 76 bp, synthetic construct; identical to SEQ ID NO: 11012
  source 1..76: mol_type = other DNA

SEQ ID NO: 20141 - DNA, 76 bp, synthetic construct; identical to SEQ ID NO: 11012
  source 1..76: mol_type = other DNA

SEQ ID NO: 20142 - DNA, 76 bp, synthetic construct; identical to SEQ ID NO: 11012
  source 1..76: mol_type = other DNA

SEQ ID NO: 20143 - DNA, 76 bp, synthetic construct; identical to SEQ ID NO: 11012
  source 1..76: mol_type = other DNA

SEQ ID NO: 20144 - DNA, 76 bp, synthetic construct; identical to SEQ ID NO: 11012
  source 1..76: mol_type = other DNA

SEQ ID NO: 20145 - DNA, 76 bp, synthetic construct; identical to SEQ ID NO: 11012
  source 1..76: mol_type = other DNA

SEQ ID NO: 20146 - DNA, 76 bp, synthetic construct; identical to SEQ ID NO: 11012
  source 1..76: mol_type = other DNA

SEQ ID NO: 20147 - DNA, 76 bp, synthetic construct; identical to SEQ ID NO: 11012
  source 1..76: mol_type = other DNA

SEQ ID NO: 20148 - DNA, 76 bp, synthetic construct; identical to SEQ ID NO: 11012
  source 1..76: mol_type = other DNA

SEQ ID NO: 20149 - DNA, 76 bp, synthetic construct; identical to SEQ ID NO: 11012
  source 1..76: mol_type = other DNA

SEQ ID NO: 20150 - DNA, 76 bp, synthetic construct; identical to SEQ ID NO: 11012
  source 1..76: mol_type = other DNA

SEQ ID NO: 20151 - DNA, 17 bp, synthetic construct
  source 1..17: mol_type = other DNA
gagaagtctgccgttac

SEQ ID NO: 20152 - DNA, 16 bp, synthetic construct
  source 1..16: mol_type = other DNA
gagaagtctgccgtta

SEQ ID NO: 20153 - DNA, 15 bp, synthetic construct
  source 1..15: mol_type = other DNA
gagaagtctgccgtt

SEQ ID NO: 20154 - DNA, 14 bp, synthetic construct
  source 1..14: mol_type = other DNA
gagaagtctgccgt

SEQ ID NO: 20155 - DNA, 13 bp, synthetic construct
  source 1..13: mol_type = other DNA
gagaagtctgccg

SEQ ID NO: 20156 - DNA, 12 bp, synthetic construct
  source 1..12: mol_type = other DNA
gagaagtctgcc

SEQ ID NO: 20157 - DNA, 11 bp, synthetic construct
  source 1..11: mol_type = other DNA
gagaagtctgc

SEQ ID NO: 20158 - DNA, 10 bp, synthetic construct
  source 1..10: mol_type = other DNA
gagaagtctg

SEQ ID NO: 20159-20160 - skipped (2 entries)

SEQ ID NO: 20161 - DNA, 17 bp, synthetic construct
  source 1..17: mol_type = other DNA
gagaagtctgccgttac

SEQ ID NO: 20162 - DNA, 16 bp, synthetic construct
  source 1..16: mol_type = other DNA
gagaagtctgccgtta

SEQ ID NO: 20163 - DNA, 15 bp, synthetic construct
  source 1..15: mol_type = other DNA
gagaagtctgccgtt

SEQ ID NO: 20164 - DNA, 14 bp, synthetic construct
  source 1..14: mol_type = other DNA
gagaagtctgccgt

SEQ ID NO: 20165 - DNA, 13 bp, synthetic construct
  source 1..13: mol_type = other DNA
gagaagtctgccg

SEQ ID NO: 20166 - DNA, 12 bp, synthetic construct
  source 1..12: mol_type = other DNA
gagaagtctgcc

SEQ ID NO: 20167 - DNA, 11 bp, synthetic construct
  source 1..11: mol_type = other DNA
gagaagtctgc

SEQ ID NO: 20168 - DNA, 10 bp, synthetic construct
  source 1..10: mol_type = other DNA
gagaagtctg

SEQ ID NO: 20169-20170 - skipped (2 entries)

SEQ ID NO: 20171 - DNA, 17 bp, synthetic construct
  source 1..17: mol_type = other DNA
gagaagtctgccgttac

SEQ ID NO: 20172 - DNA, 16 bp, synthetic construct
  source 1..16: mol_type = other DNA
gagaagtctgccgtta

SEQ ID NO: 20173 - DNA, 15 bp, synthetic construct
  source 1..15: mol_type = other DNA
gagaagtctgccgtt

SEQ ID NO: 20174 - DNA, 14 bp, synthetic construct
  source 1..14: mol_type = other DNA
gagaagtctgccgt

SEQ ID NO: 20175 - DNA, 13 bp, synthetic construct
  source 1..13: mol_type = other DNA
gagaagtctgccg

SEQ ID NO: 20176 - DNA, 12 bp, synthetic construct
  source 1..12: mol_type = other DNA
gagaagtctgcc

SEQ ID NO: 20177 - DNA, 11 bp, synthetic construct
  source 1..11: mol_type = other DNA
gagaagtctgc

SEQ ID NO: 20178 - DNA, 10 bp, synthetic construct
  source 1..10: mol_type = other DNA
gagaagtctg

SEQ ID NO: 20179-20180 - skipped (2 entries)

SEQ ID NO: 20181 - DNA, 17 bp, synthetic construct
  source 1..17: mol_type = other DNA
gagaagtctgccgttac

SEQ ID NO: 20182 - DNA, 16 bp, synthetic construct
  source 1..16: mol_type = other DNA
gagaagtctgccgtta

SEQ ID NO: 20183 - DNA, 15 bp, synthetic construct
  source 1..15: mol_type = other DNA
gagaagtctgccgtt

SEQ ID NO: 20184 - DNA, 14 bp, synthetic construct
  source 1..14: mol_type = other DNA
gagaagtctgccgt

SEQ ID NO: 20185 - DNA, 13 bp, synthetic construct
  source 1..13: mol_type = other DNA
gagaagtctgccg

SEQ ID NO: 20186 - DNA, 12 bp, synthetic construct
  source 1..12: mol_type = other DNA
gagaagtctgcc

SEQ ID NO: 20187 - DNA, 11 bp, synthetic construct
  source 1..11: mol_type = other DNA
gagaagtctgc

SEQ ID NO: 20188 - DNA, 10 bp, synthetic construct
  source 1..10: mol_type = other DNA
gagaagtctg

SEQ ID NO: 20189-20190 - skipped (2 entries)

SEQ ID NO: 20191 - DNA, 17 bp, synthetic construct
  source 1..17: mol_type = other DNA
gagaagtctgccgttac

SEQ ID NO: 20192 - DNA, 16 bp, synthetic construct
  source 1..16: mol_type = other DNA
gagaagtctgccgtta

SEQ ID NO: 20193 - DNA, 15 bp, synthetic construct
  source 1..15: mol_type = other DNA
gagaagtctgccgtt

SEQ ID NO: 20194 - DNA, 14 bp, synthetic construct
  source 1..14: mol_type = other DNA
gagaagtctgccgt

SEQ ID NO: 20195 - DNA, 13 bp, synthetic construct
  source 1..13: mol_type = other DNA
gagaagtctgccg

SEQ ID NO: 20196 - DNA, 12 bp, synthetic construct
  source 1..12: mol_type = other DNA
gagaagtctgcc

SEQ ID NO: 20197 - DNA, 11 bp, synthetic construct
  source 1..11: mol_type = other DNA
gagaagtctgc

SEQ ID NO: 20198 - DNA, 10 bp, synthetic construct
  source 1..10: mol_type = other DNA
gagaagtctg

SEQ ID NO: 20199-20200 - skipped (2 entries)

SEQ ID NO: 20201 - DNA, 17 bp, synthetic construct
  source 1..17: mol_type = other DNA
gagaagtctgccgttac

SEQ ID NO: 20202 - DNA, 16 bp, synthetic construct
  source 1..16: mol_type = other DNA
gagaagtctgccgtta

SEQ ID NO: 20203 - DNA, 15 bp, synthetic construct
  source 1..15: mol_type = other DNA
gagaagtctgccgtt

SEQ ID NO: 20204 - DNA, 14 bp, synthetic construct
  source 1..14: mol_type = other DNA
gagaagtctgccgt

SEQ ID NO: 20205 - DNA, 13 bp, synthetic construct
  source 1..13: mol_type = other DNA
gagaagtctgccg

SEQ ID NO: 20206 - DNA, 12 bp, synthetic construct
  source 1..12: mol_type = other DNA
gagaagtctgcc

SEQ ID NO: 20207 - DNA, 11 bp, synthetic construct
  source 1..11: mol_type = other DNA
gagaagtctgc

SEQ ID NO: 20208 - DNA, 10 bp, synthetic construct
  source 1..10: mol_type = other DNA
gagaagtctg

SEQ ID NO: 20209-20210 - skipped (2 entries)

SEQ ID NO: 20211 - DNA, 17 bp, synthetic construct
  source 1..17: mol_type = other DNA
gagaagtctgccgttac

SEQ ID NO: 20212 - DNA, 16 bp, synthetic construct
  source 1..16: mol_type = other DNA
gagaagtctgccgtta

SEQ ID NO: 20213 - DNA, 15 bp, synthetic construct
  source 1..15: mol_type = other DNA
gagaagtctgccgtt

SEQ ID NO: 20214 - DNA, 14 bp, synthetic construct
  source 1..14: mol_type = other DNA
gagaagtctgccgt

SEQ ID NO: 20215 - DNA, 13 bp, synthetic construct
  source 1..13: mol_type = other DNA
gagaagtctgccg

SEQ ID NO: 20216 - DNA, 12 bp, synthetic construct
  source 1..12: mol_type = other DNA
gagaagtctgcc

SEQ ID NO: 20217 - DNA, 11 bp, synthetic construct
  source 1..11: mol_type = other DNA
gagaagtctgc

SEQ ID NO: 20218 - DNA, 10 bp, synthetic construct
  source 1..10: mol_type = other DNA
gagaagtctg

SEQ ID NO: 20219-20220 - skipped (2 entries)

SEQ ID NO: 20221 - DNA, 17 bp, synthetic construct
  source 1..17: mol_type = other DNA
gagaagtctgccgttac

SEQ ID NO: 20222 - DNA, 16 bp, synthetic construct
  source 1..16: mol_type = other DNA
gagaagtctgccgtta

SEQ ID NO: 20223 - DNA, 15 bp, synthetic construct
  source 1..15: mol_type = other DNA
gagaagtctgccgtt

SEQ ID NO: 20224 - DNA, 14 bp, synthetic construct
  source 1..14: mol_type = other DNA
gagaagtctgccgt

SEQ ID NO: 20225 - DNA, 13 bp, synthetic construct
  source 1..13: mol_type = other DNA
gagaagtctgccg

SEQ ID NO: 20226 - DNA, 12 bp, synthetic construct
  source 1..12: mol_type = other DNA
gagaagtctgcc

SEQ ID NO: 20227 - DNA, 11 bp, synthetic construct
  source 1..11: mol_type = other DNA
gagaagtctgc

SEQ ID NO: 20228 - DNA, 10 bp, synthetic construct
  source 1..10: mol_type = other DNA
gagaagtctg

SEQ ID NO: 20229-20230 - skipped (2 entries)

SEQ ID NO: 20231 - DNA, 17 bp, synthetic construct
  source 1..17: mol_type = other DNA
gagaagtctgccgttac

SEQ ID NO: 20232 - DNA, 16 bp, synthetic construct
  source 1..16: mol_type = other DNA
gagaagtctgccgtta

SEQ ID NO: 20233 - DNA, 15 bp, synthetic construct
  source 1..15: mol_type = other DNA
gagaagtctgccgtt

SEQ ID NO: 20234 - DNA, 14 bp, synthetic construct
  source 1..14: mol_type = other DNA
gagaagtctgccgt

SEQ ID NO: 20235 - DNA, 13 bp, synthetic construct
  source 1..13: mol_type = other DNA
gagaagtctgccg

SEQ ID NO: 20236 - DNA, 12 bp, synthetic construct
  source 1..12: mol_type = other DNA
gagaagtctgcc

SEQ ID NO: 20237 - DNA, 11 bp, synthetic construct
  source 1..11: mol_type = other DNA
gagaagtctgc

SEQ ID NO: 20238 - DNA, 10 bp, synthetic construct
  source 1..10: mol_type = other DNA
gagaagtctg

SEQ ID NO: 20239-20240 - skipped (2 entries)

SEQ ID NO: 20241 - DNA, 20 bp, synthetic construct
  source 1..20: mol_type = other DNA
tggtgcacctgactcctgag

SEQ ID NO: 20242 - DNA, 20 bp, synthetic construct
  source 1..20: mol_type = other DNA
tggtgcacctgactcctgag

SEQ ID NO: 20243 - DNA, 20 bp, synthetic construct
  source 1..20: mol_type = other DNA
tggtgcacctgactcctgag

SEQ ID NO: 20244 - DNA, 20 bp, synthetic construct
  source 1..20: mol_type = other DNA
tggtgcacctgactcctgag

SEQ ID NO: 20245 - DNA, 20 bp, synthetic construct
  source 1..20: mol_type = other DNA
tggtgcacctgactcctgag

SEQ ID NO: 20246 - DNA, 20 bp, synthetic construct
  source 1..20: mol_type = other DNA
tggtgcacctgactcctgag

SEQ ID NO: 20247 - DNA, 20 bp, synthetic construct
  source 1..20: mol_type = other DNA
tggtgcacctgactcctgag

SEQ ID NO: 20248 - DNA, 20 bp, synthetic construct
  source 1..20: mol_type = other DNA
tggtgcacctgactcctgag

SEQ ID NO: 20249 - DNA, 20 bp, synthetic construct
  source 1..20: mol_type = other DNA
tggtgcacctgactcctgag

SEQ ID NO: 20250 - DNA, 20 bp, synthetic construct
  source 1..20: mol_type = other DNA
tggtgcacctgactcctgag

SEQ ID NO: 20251 - DNA, 19 bp, synthetic construct
  source 1..19: mol_type = other DNA
ggtgcacctgactcctgag

SEQ ID NO: 20252 - DNA, 19 bp, synthetic construct
  source 1..19: mol_type = other DNA
ggtgcacctgactcctgag

SEQ ID NO: 20253 - DNA, 19 bp, synthetic construct
  source 1..19: mol_type = other DNA
ggtgcacctgactcctgag

SEQ ID NO: 20254 - DNA, 19 bp, synthetic construct
  source 1..19: mol_type = other DNA
ggtgcacctgactcctgag

SEQ ID NO: 20255 - DNA, 19 bp, synthetic construct
  source 1..19: mol_type = other DNA
ggtgcacctgactcctgag

SEQ ID NO: 20256 - DNA, 19 bp, synthetic construct
  source 1..19: mol_type = other DNA
ggtgcacctgactcctgag

SEQ ID NO: 20257 - DNA, 19 bp, synthetic construct
  source 1..19: mol_type = other DNA
ggtgcacctgactcctgag

SEQ ID NO: 20258 - DNA, 19 bp, synthetic construct
  source 1..19: mol_type = other DNA
ggtgcacctgactcctgag

SEQ ID NO: 20259 - DNA, 19 bp, synthetic construct
  source 1..19: mol_type = other DNA
ggtgcacctgactcctgag

SEQ ID NO: 20260 - DNA, 19 bp, synthetic construct
  source 1..19: mol_type = other DNA
ggtgcacctgactcctgag

SEQ ID NO: 20261 - DNA, 18 bp, synthetic construct
  source 1..18: mol_type = other DNA
gtgcacctgactcctgag

SEQ ID NO: 20262 - DNA, 18 bp, synthetic construct
  source 1..18: mol_type = other DNA
gtgcacctgactcctgag

SEQ ID NO: 20263 - DNA, 18 bp, synthetic construct
  source 1..18: mol_type = other DNA
gtgcacctgactcctgag

SEQ ID NO: 20264 - DNA, 18 bp, synthetic construct
  source 1..18: mol_type = other DNA
gtgcacctgactcctgag

SEQ ID NO: 20265 - DNA, 18 bp, synthetic construct
  source 1..18: mol_type = other DNA
gtgcacctgactcctgag

SEQ ID NO: 20266 - DNA, 18 bp, synthetic construct
  source 1..18: mol_type = other DNA
gtgcacctgactcctgag

SEQ ID NO: 20267 - DNA, 18 bp, synthetic construct
  source 1..18: mol_type = other DNA
gtgcacctgactcctgag

SEQ ID NO: 20268 - DNA, 18 bp, synthetic construct
  source 1..18: mol_type = other DNA
gtgcacctgactcctgag

SEQ ID NO: 20269 - DNA, 18 bp, synthetic construct
  source 1..18: mol_type = other DNA
gtgcacctgactcctgag

SEQ ID NO: 20270 - DNA, 18 bp, synthetic construct
  source 1..18: mol_type = other DNA
gtgcacctgactcctgag

SEQ ID NO: 20271 - DNA, 17 bp, synthetic construct
  source 1..17: mol_type = other DNA
tgcacctgactcctgag

SEQ ID NO: 20272 - DNA, 17 bp, synthetic construct
  source 1..17: mol_type = other DNA
tgcacctgactcctgag

SEQ ID NO: 20273 - DNA, 17 bp, synthetic construct
  source 1..17: mol_type = other DNA
tgcacctgactcctgag

SEQ ID NO: 20274 - DNA, 17 bp, synthetic construct
  source 1..17: mol_type = other DNA
tgcacctgactcctgag

SEQ ID NO: 20275 - DNA, 17 bp, synthetic construct
  source 1..17: mol_type = other DNA
tgcacctgactcctgag

SEQ ID NO: 20276 - DNA, 17 bp, synthetic construct
  source 1..17: mol_type = other DNA
tgcacctgactcctgag

SEQ ID NO: 20277 - DNA, 17 bp, synthetic construct
  source 1..17: mol_type = other DNA
tgcacctgactcctgag

SEQ ID NO: 20278 - DNA, 17 bp, synthetic construct
  source 1..17: mol_type = other DNA
tgcacctgactcctgag

SEQ ID NO: 20279 - DNA, 17 bp, synthetic construct
  source 1..17: mol_type = other DNA
tgcacctgactcctgag

SEQ ID NO: 20280 - DNA, 17 bp, synthetic construct
  source 1..17: mol_type = other DNA
tgcacctgactcctgag

SEQ ID NO: 20281 - DNA, 16 bp, synthetic construct
  source 1..16: mol_type = other DNA
gcacctgactcctgag

SEQ ID NO: 20282 - DNA, 16 bp, synthetic construct
  source 1..16: mol_type = other DNA
gcacctgactcctgag

SEQ ID NO: 20283 - DNA, 16 bp, synthetic construct
  source 1..16: mol_type = other DNA
gcacctgactcctgag

SEQ ID NO: 20284 - DNA, 16 bp, synthetic construct
  source 1..16: mol_type = other DNA
gcacctgactcctgag

SEQ ID NO: 20285 - DNA, 16 bp, synthetic construct
  source 1..16: mol_type = other DNA
gcacctgactcctgag

SEQ ID NO: 20286 - DNA, 16 bp, synthetic construct
  source 1..16: mol_type = other DNA
gcacctgactcctgag

SEQ ID NO: 20287 - DNA, 16 bp, synthetic construct
  source 1..16: mol_type = other DNA
gcacctgactcctgag

SEQ ID NO: 20288 - DNA, 16 bp, synthetic construct
  source 1..16: mol_type = other DNA
gcacctgactcctgag

SEQ ID NO: 20289 - DNA, 16 bp, synthetic construct
  source 1..16: mol_type = other DNA
gcacctgactcctgag

SEQ ID NO: 20290 - DNA, 16 bp, synthetic construct
  source 1..16: mol_type = other DNA
gcacctgactcctgag

SEQ ID NO: 20291 - DNA, 14 bp, synthetic construct
  source 1..14: mol_type = other DNA
acctgactcctgag

SEQ ID NO: 20292 - DNA, 14 bp, synthetic construct
  source 1..14: mol_type = other DNA
acctgactcctgag

SEQ ID NO: 20293 - DNA, 14 bp, synthetic construct
  source 1..14: mol_type = other DNA
acctgactcctgag

SEQ ID NO: 20294 - DNA, 14 bp, synthetic construct
  source 1..14: mol_type = other DNA
acctgactcctgag

SEQ ID NO: 20295 - DNA, 14 bp, synthetic construct
  source 1..14: mol_type = other DNA
acctgactcctgag

SEQ ID NO: 20296 - DNA, 14 bp, synthetic construct
  source 1..14: mol_type = other DNA
acctgactcctgag

SEQ ID NO: 20297 - DNA, 14 bp, synthetic construct
  source 1..14: mol_type = other DNA
acctgactcctgag

SEQ ID NO: 20298 - DNA, 14 bp, synthetic construct
  source 1..14: mol_type = other DNA
acctgactcctgag

SEQ ID NO: 20299 - DNA, 14 bp, synthetic construct
  source 1..14: mol_type = other DNA
acctgactcctgag

SEQ ID NO: 20300 - DNA, 14 bp, synthetic construct
  source 1..14: mol_type = other DNA
acctgactcctgag

SEQ ID NO: 20301 - DNA, 11 bp, synthetic construct
  source 1..11: mol_type = other DNA
tgactcctgag

SEQ ID NO: 20302 - DNA, 11 bp, synthetic construct
  source 1..11: mol_type = other DNA
tgactcctgag

SEQ ID NO: 20303 - DNA, 11 bp, synthetic construct
  source 1..11: mol_type = other DNA
tgactcctgag

SEQ ID NO: 20304 - DNA, 11 bp, synthetic construct
  source 1..11: mol_type = other DNA
tgactcctgag

SEQ ID NO: 20305 - DNA, 11 bp, synthetic construct
  source 1..11: mol_type = other DNA
tgactcctgag

SEQ ID NO: 20306 - DNA, 11 bp, synthetic construct
  source 1..11: mol_type = other DNA
tgactcctgag

SEQ ID NO: 20307 - DNA, 11 bp, synthetic construct
  source 1..11: mol_type = other DNA
tgactcctgag

SEQ ID NO: 20308 - DNA, 11 bp, synthetic construct
  source 1..11: mol_type = other DNA
tgactcctgag

SEQ ID NO: 20309 - DNA, 11 bp, synthetic construct
  source 1..11: mol_type = other DNA
tgactcctgag

SEQ ID NO: 20310 - DNA, 11 bp, synthetic construct
  source 1..11: mol_type = other DNA
tgactcctgag

SEQ ID NO: 20311 - DNA, 10 bp, synthetic construct
  source 1..10: mol_type = other DNA
gactcctgag

SEQ ID NO: 20312 - DNA, 10 bp, synthetic construct
  source 1..10: mol_type = other DNA
gactcctgag

SEQ ID NO: 20313 - DNA, 10 bp, synthetic construct
  source 1..10: mol_type = other DNA
gactcctgag

SEQ ID NO: 20314 - DNA, 10 bp, synthetic construct
  source 1..10: mol_type = other DNA
gactcctgag

SEQ ID NO: 20315 - DNA, 10 bp, synthetic construct
  source 1..10: mol_type = other DNA
gactcctgag

SEQ ID NO: 20316 - DNA, 10 bp, synthetic construct
  source 1..10: mol_type = other DNA
gactcctgag

SEQ ID NO: 20317 - DNA, 10 bp, synthetic construct
  source 1..10: mol_type = other DNA
gactcctgag

SEQ ID NO: 20318 - DNA, 10 bp, synthetic construct
  source 1..10: mol_type = other DNA
gactcctgag

SEQ ID NO: 20319 - DNA, 10 bp, synthetic construct
  source 1..10: mol_type = other DNA
gactcctgag

SEQ ID NO: 20320 - DNA, 10 bp, synthetic construct
  source 1..10: mol_type = other DNA
gactcctgag

SEQ ID NO: 20321-20330 - skipped (10 entries)

SEQ ID NO: 20331 - DNA, 133 bp, synthetic construct
  source 1..133: mol_type = other DNA
gtaacggcagacttctccacgttttagagctagaaatagcaagttaaaataaggctagtccgttatcaacttgaaaaagtggcaccgagtcggtgctggtgcacctgactcctgaggagaagtctgccgttac

SEQ ID NO: 20332 - DNA, 132 bp, synthetic construct
  source 1..132: mol_type = other DNA
gtaacggcagacttctccacgttttagagctagaaatagcaagttaaaataaggctagtccgttatcaacttgaaaaagtggcaccgagtcggtgctggtgcacctgactcctgaggagaagtctgccgtta

SEQ ID NO: 20333 - DNA, 131 bp, synthetic construct
  source 1..131: mol_type = other DNA
gtaacggcagacttctccacgttttagagctagaaatagcaagttaaaataaggctagtccgttatcaacttgaaaaagtggcaccgagtcggtgctggtgcacctgactcctgaggagaagtctgccgtt

SEQ ID NO: 20334 - DNA, 130 bp, synthetic construct
  source 1..130: mol_type = other DNA
gtaacggcagacttctccacgttttagagctagaaatagcaagttaaaataaggctagtccgttatcaacttgaaaaagtggcaccgagtcggtgctggtgcacctgactcctgaggagaagtctgccgt

SEQ ID NO: 20335 - DNA, 129 bp, synthetic construct
  source 1..129: mol_type = other DNA
gtaacggcagacttctccacgttttagagctagaaatagcaagttaaaataaggctagtccgttatcaacttgaaaaagtggcaccgagtcggtgctggtgcacctgactcctgaggagaagtctgccg

SEQ ID NO: 20336 - DNA, 128 bp, synthetic construct
  source 1..128: mol_type = other DNA
gtaacggcagacttctccacgttttagagctagaaatagcaagttaaaataaggctagtccgttatcaacttgaaaaagtggcaccgagtcggtgctggtgcacctgactcctgaggagaagtctgcc

SEQ ID NO: 20337 - DNA, 127 bp, synthetic construct
  source 1..127: mol_type = other DNA
gtaacggcagacttctccacgttttagagctagaaatagcaagttaaaataaggctagtccgttatcaacttgaaaaagtggcaccgagtcggtgctggtgcacctgactcctgaggagaagtctgc

SEQ ID NO: 20338 - DNA, 126 bp, synthetic construct
  source 1..126: mol_type = other DNA
gtaacggcagacttctccacgttttagagctagaaatagcaagttaaaataaggctagtccgttatcaacttgaaaaagtggcaccgagtcggtgctggtgcacctgactcctgaggagaagtctg

SEQ ID NO: 20339 - DNA, 125 bp, synthetic construct
  source 1..125: mol_type = other DNA
gtaacggcagacttctccacgttttagagctagaaatagcaagttaaaataaggctagtccgttatcaacttgaaaaagtggcaccgagtcggtgctggtgcacctgactcctgaggagaagtct

SEQ ID NO: 20340 - DNA, 124 bp, synthetic construct
  source 1..124: mol_type = other DNA
gtaacggcagacttctccacgttttagagctagaaatagcaagttaaaataaggctagtccgttatcaacttgaaaaagtggcaccgagtcggtgctggtgcacctgactcctgaggagaagtc

SEQ ID NO: 20341 - DNA, 132 bp, synthetic construct
  source 1..132: mol_type = other DNA
gtaacggcagacttctccacgttttagagctagaaatagcaagttaaaataaggctagtccgttatcaacttgaaaaagtggcaccgagtcggtgcggtgcacctgactcctgaggagaagtctgccgttac

SEQ ID NO: 20342 - DNA, 131 bp, synthetic construct
  source 1..131: mol_type = other DNA
gtaacggcagacttctccacgttttagagctagaaatagcaagttaaaataaggctagtccgttatcaacttgaaaaagtggcaccgagtcggtgcggtgcacctgactcctgaggagaagtctgccgtta

SEQ ID NO: 20343 - DNA, 130 bp, synthetic construct
  source 1..130: mol_type = other DNA
gtaacggcagacttctccacgttttagagctagaaatagcaagttaaaataaggctagtccgttatcaacttgaaaaagtggcaccgagtcggtgcggtgcacctgactcctgaggagaagtctgccgtt

SEQ ID NO: 20344 - DNA, 129 bp, synthetic construct
  source 1..129: mol_type = other DNA
gtaacggcagacttctccacgttttagagctagaaatagcaagttaaaataaggctagtccgttatcaacttgaaaaagtggcaccgagtcggtgcggtgcacctgactcctgaggagaagtctgccgt

SEQ ID NO: 20345 - DNA, 128 bp, synthetic construct
  source 1..128: mol_type = other DNA
gtaacggcagacttctccacgttttagagctagaaatagcaagttaaaataaggctagtccgttatcaacttgaaaaagtggcaccgagtcggtgcggtgcacctgactcctgaggagaagtctgccg

SEQ ID NO: 20346 - DNA, 127 bp, synthetic construct
  source 1..127: mol_type = other DNA
gtaacggcagacttctccacgttttagagctagaaatagcaagttaaaataaggctagtccgttatcaacttgaaaaagtggcaccgagtcggtgcggtgcacctgactcctgaggagaagtctgcc

SEQ ID NO: 20347 - DNA, 126 bp, synthetic construct
  source 1..126: mol_type = other DNA
gtaacggcagacttctccacgttttagagctagaaatagcaagttaaaataaggctagtccgttatcaacttgaaaaagtggcaccgagtcggtgcggtgcacctgactcctgaggagaagtctgc

SEQ ID NO: 20348 - DNA, 125 bp, synthetic construct
  source 1..125: mol_type = other DNA
gtaacggcagacttctccacgttttagagctagaaatagcaagttaaaataaggctagtccgttatcaacttgaaaaagtggcaccgagtcggtgcggtgcacctgactcctgaggagaagtctg

SEQ ID NO: 20349 - DNA, 124 bp, synthetic construct
  source 1..124: mol_type = other DNA
gtaacggcagacttctccacgttttagagctagaaatagcaagttaaaataaggctagtccgttatcaacttgaaaaagtggcaccgagtcggtgcggtgcacctgactcctgaggagaagtct

SEQ ID NO: 20350 - DNA, 123 bp, synthetic construct
  source 1..123: mol_type = other DNA
gtaacggcagacttctccacgttttagagctagaaatagcaagttaaaataaggctagtccgttatcaacttgaaaaagtggcaccgagtcggtgcggtgcacctgactcctgaggagaagtc

SEQ ID NO: 20351 - DNA, 131 bp, synthetic construct
  source 1..131: mol_type = other DNA
gtaacggcagacttctccacgttttagagctagaaatagcaagttaaaataaggctagtccgttatcaacttgaaaaagtggcaccgagtcggtgcgtgcacctgactcctgaggagaagtctgccgttac

SEQ ID NO: 20352 - DNA, 130 bp, synthetic construct
  source 1..130: mol_type = other DNA
gtaacggcagacttctccacgttttagagctagaaatagcaagttaaaataaggctagtccgttatcaacttgaaaaagtggcaccgagtcggtgcgtgcacctgactcctgaggagaagtctgccgtta

SEQ ID NO: 20353 - DNA, 129 bp, synthetic construct
  source 1..129: mol_type = other DNA
gtaacggcagacttctccacgttttagagctagaaatagcaagttaaaataaggctagtccgttatcaacttgaaaaagtggcaccgagtcggtgcgtgcacctgactcctgaggagaagtctgccgtt

SEQ ID NO: 20354 - DNA, 128 bp, synthetic construct
  source 1..128: mol_type = other DNA
gtaacggcagacttctccacgttttagagctagaaatagcaagttaaaataaggctagtccgttatcaacttgaaaaagtggcaccgagtcggtgcgtgcacctgactcctgaggagaagtctgccgt

SEQ ID NO: 20355 - DNA, 127 bp, synthetic construct
  source 1..127: mol_type = other DNA
gtaacggcagacttctccacgttttagagctagaaatagcaagttaaaataaggctagtccgttatcaacttgaaaaagtggcaccgagtcggtgcgtgcacctgactcctgaggagaagtctgccg

SEQ ID NO: 20356 - DNA, 126 bp, synthetic construct
  source 1..126: mol_type = other DNA
gtaacggcagacttctccacgttttagagctagaaatagcaagttaaaataaggctagtccgttatcaacttgaaaaagtggcaccgagtcggtgcgtgcacctgactcctgaggagaagtctgcc

SEQ ID NO: 20357 - DNA, 125 bp, synthetic construct
  source 1..125: mol_type = other DNA
gtaacggcagacttctccacgttttagagctagaaatagcaagttaaaataaggctagtccgttatcaacttgaaaaagtggcaccgagtcggtgcgtgcacctgactcctgaggagaagtctgc

SEQ ID NO: 20358 - DNA, 124 bp, synthetic construct
  source 1..124: mol_type = other DNA
gtaacggcagacttctccacgttttagagctagaaatagcaagttaaaataaggctagtccgttatcaacttgaaaaagtggcaccgagtcggtgcgtgcacctgactcctgaggagaagtctg

SEQ ID NO: 20359 - DNA, 123 bp, synthetic construct
  source 1..123: mol_type = other DNA
gtaacggcagacttctccacgttttagagctagaaatagcaagttaaaataaggctagtccgttatcaacttgaaaaagtggcaccgagtcggtgcgtgcacctgactcctgaggagaagtct

SEQ ID NO: 20360 - DNA, 122 bp, synthetic construct
  source 1..122: mol_type = other DNA
gtaacggcagacttctccacgttttagagctagaaatagcaagttaaaataaggctagtccgttatcaacttgaaaaagtggcaccgagtcggtgcgtgcacctgactcctgaggagaagtc

SEQ ID NO: 20361 - DNA, 130 bp, synthetic construct
  source 1..130: mol_type = other DNA
gtaacggcagacttctccacgttttagagctagaaatagcaagttaaaataaggctagtccgttatcaacttgaaaaagtggcaccgagtcggtgctgcacctgactcctgaggagaagtctgccgttac

SEQ ID NO: 20362 - DNA, 129 bp, synthetic construct
  source 1..129: mol_type = other DNA
gtaacggcagacttctccacgttttagagctagaaatagcaagttaaaataaggctagtccgttatcaacttgaaaaagtggcaccgagtcggtgctgcacctgactcctgaggagaagtctgccgtta

SEQ ID NO: 20363 - DNA, 128 bp, synthetic construct
  source 1..128: mol_type = other DNA
gtaacggcagacttctccacgttttagagctagaaatagcaagttaaaataaggctagtccgttatcaacttgaaaaagtggcaccgagtcggtgctgcacctgactcctgaggagaagtctgccgtt

SEQ ID NO: 20364 - DNA, 127 bp, synthetic construct
  source 1..127: mol_type = other DNA
gtaacggcagacttctccacgttttagagctagaaatagcaagttaaaataaggctagtccgttatcaacttgaaaaagtggcaccgagtcggtgctgcacctgactcctgaggagaagtctgccgt

SEQ ID NO: 20365 - DNA, 126 bp, synthetic construct
  source 1..126: mol_type = other DNA
gtaacggcagacttctccacgttttagagctagaaatagcaagttaaaataaggctagtccgttatcaacttgaaaaagtggcaccgagtcggtgctgcacctgactcctgaggagaagtctgccg

SEQ ID NO: 20366 - DNA, 125 bp, synthetic construct
  source 1..125: mol_type = other DNA
gtaacggcagacttctccacgttttagagctagaaatagcaagttaaaataaggctagtccgttatcaacttgaaaaagtggcaccgagtcggtgctgcacctgactcctgaggagaagtctgcc

SEQ ID NO: 20367 - DNA, 124 bp, synthetic construct
  source 1..124: mol_type = other DNA
gtaacggcagacttctccacgttttagagctagaaatagcaagttaaaataaggctagtccgttatcaacttgaaaaagtggcaccgagtcggtgctgcacctgactcctgaggagaagtctgc

SEQ ID NO: 20368 - DNA, 123 bp, synthetic construct
  source 1..123: mol_type = other DNA
gtaacggcagacttctccacgttttagagctagaaatagcaagttaaaataaggctagtccgttatcaacttgaaaaagtggcaccgagtcggtgctgcacctgactcctgaggagaagtctg

SEQ ID NO: 20369 - DNA, 122 bp, synthetic construct
  source 1..122: mol_type = other DNA
gtaacggcagacttctccacgttttagagctagaaatagcaagttaaaataaggctagtccgttatcaacttgaaaaagtggcaccgagtcggtgctgcacctgactcctgaggagaagtct

SEQ ID NO: 20370 - DNA, 121 bp, synthetic construct
  source 1..121: mol_type = other DNA
gtaacggcagacttctccacgttttagagctagaaatagcaagttaaaataaggctagtccgttatcaacttgaaaaagtggcaccgagtcggtgctgcacctgactcctgaggagaagtc

SEQ ID NO: 20371 - DNA, 129 bp, synthetic construct
  source 1..129: mol_type = other DNA
gtaacggcagacttctccacgttttagagctagaaatagcaagttaaaataaggctagtccgttatcaacttgaaaaagtggcaccgagtcggtgcgcacctgactcctgaggagaagtctgccgttac

SEQ ID NO: 20372 - DNA, 128 bp, synthetic construct
  source 1..128: mol_type = other DNA
gtaacggcagacttctccacgttttagagctagaaatagcaagttaaaataaggctagtccgttatcaacttgaaaaagtggcaccgagtcggtgcgcacctgactcctgaggagaagtctgccgtta

SEQ ID NO: 20373 - DNA, 127 bp, synthetic construct
  source 1..127: mol_type = other DNA
gtaacggcagacttctccacgttttagagctagaaatagcaagttaaaataaggctagtccgttatcaacttgaaaaagtggcaccgagtcggtgcgcacctgactcctgaggagaagtctgccgtt

SEQ ID NO: 20374 - DNA, 126 bp, synthetic construct
  source 1..126: mol_type = other DNA
gtaacggcagacttctccacgttttagagctagaaatagcaagttaaaataaggctagtccgttatcaacttgaaaaagtggcaccgagtcggtgcgcacctgactcctgaggagaagtctgccgt

SEQ ID NO: 20375 - DNA, 125 bp, synthetic construct
  source 1..125: mol_type = other DNA
gtaacggcagacttctccacgttttagagctagaaatagcaagttaaaataaggctagtccgttatcaacttgaaaaagtggcaccgagtcggtgcgcacctgactcctgaggagaagtctgccg

SEQ ID NO: 20376 - DNA, 124 bp, synthetic construct
  source 1..124: mol_type = other DNA
gtaacggcagacttctccacgttttagagctagaaatagcaagttaaaataaggctagtccgttatcaacttgaaaaagtggcaccgagtcggtgcgcacctgactcctgaggagaagtctgcc

SEQ ID NO: 20377 - DNA, 123 bp, synthetic construct
  source 1..123: mol_type = other DNA
gtaacggcagacttctccacgttttagagctagaaatagcaagttaaaataaggctagtccgttatcaacttgaaaaagtggcaccgagtcggtgcgcacctgactcctgaggagaagtctgc

SEQ ID NO: 20378 - DNA, 122 bp, synthetic construct
  source 1..122: mol_type = other DNA
gtaacggcagacttctccacgttttagagctagaaatagcaagttaaaataaggctagtccgttatcaacttgaaaaagtggcaccgagtcggtgcgcacctgactcctgaggagaagtctg

SEQ ID NO: 20379 - DNA, 121 bp, synthetic construct
  source 1..121: mol_type = other DNA
gtaacggcagacttctccacgttttagagctagaaatagcaagttaaaataaggctagtccgttatcaacttgaaaaagtggcaccgagtcggtgcgcacctgactcctgaggagaagtct

SEQ ID NO: 20380 - DNA, 120 bp, synthetic construct
  source 1..120: mol_type = other DNA
gtaacggcagacttctccacgttttagagctagaaatagcaagttaaaataaggctagtccgttatcaacttgaaaaagtggcaccgagtcggtgcgcacctgactcctgaggagaagtc

SEQ ID NO: 20381 - DNA, 127 bp, synthetic construct
  source 1..127: mol_type = other DNA
gtaacggcagacttctccacgttttagagctagaaatagcaagttaaaataaggctagtccgttatcaacttgaaaaagtggcaccgagtcggtgcacctgactcctgaggagaagtctgccgttac

SEQ ID NO: 20382 - DNA, 126 bp, synthetic construct
  source 1..126: mol_type = other DNA
gtaacggcagacttctccacgttttagagctagaaatagcaagttaaaataaggctagtccgttatcaacttgaaaaagtggcaccgagtcggtgcacctgactcctgaggagaagtctgccgtta

SEQ ID NO: 20383 - DNA, 125 bp, synthetic construct
  source 1..125: mol_type = other DNA
gtaacggcagacttctccacgttttagagctagaaatagcaagttaaaataaggctagtccgttatcaacttgaaaaagtggcaccgagtcggtgcacctgactcctgaggagaagtctgccgtt

SEQ ID NO: 20384 - DNA, 124 bp, synthetic construct
  source 1..124: mol_type = other DNA
gtaacggcagacttctccacgttttagagctagaaatagcaagttaaaataaggctagtccgttatcaacttgaaaaagtggcaccgagtcggtgcacctgactcctgaggagaagtctgccgt

SEQ ID NO: 20385 - DNA, 123 bp, synthetic construct
  source 1..123: mol_type = other DNA
gtaacggcagacttctccacgttttagagctagaaatagcaagttaaaataaggctagtccgttatcaacttgaaaaagtggcaccgagtcggtgcacctgactcctgaggagaagtctgccg

SEQ ID NO: 20386 - DNA, 122 bp, synthetic construct
  source 1..122: mol_type = other DNA
gtaacggcagacttctccacgttttagagctagaaatagcaagttaaaataaggctagtccgttatcaacttgaaaaagtggcaccgagtcggtgcacctgactcctgaggagaagtctgcc

SEQ ID NO: 20387 - DNA, 121 bp, synthetic construct
  source 1..121: mol_type = other DNA
gtaacggcagacttctccacgttttagagctagaaatagcaagttaaaataaggctagtccgttatcaacttgaaaaagtggcaccgagtcggtgcacctgactcctgaggagaagtctgc

SEQ ID NO: 20388 - DNA, 120 bp, synthetic construct
  source 1..120: mol_type = other DNA
gtaacggcagacttctccacgttttagagctagaaatagcaagttaaaataaggctagtccgttatcaacttgaaaaagtggcaccgagtcggtgcacctgactcctgaggagaagtctg

SEQ ID NO: 20389 - DNA, 119 bp, synthetic construct
  source 1..119: mol_type = other DNA
gtaacggcagacttctccacgttttagagctagaaatagcaagttaaaataaggctagtccgttatcaacttgaaaaagtggcaccgagtcggtgcacctgactcctgaggagaagtct

SEQ ID NO: 20390 - DNA, 118 bp, synthetic construct
  source 1..118: mol_type = other DNA
gtaacggcagacttctccacgttttagagctagaaatagcaagttaaaataaggctagtccgttatcaacttgaaaaagtggcaccgagtcggtgcacctgactcctgaggagaagtc

SEQ ID NO: 20391 - DNA, 124 bp, synthetic construct
  source 1..124: mol_type = other DNA
gtaacggcagacttctccacgttttagagctagaaatagcaagttaaaataaggctagtccgttatcaacttgaaaaagtggcaccgagtcggtgctgactcctgaggagaagtctgccgttac

SEQ ID NO: 20392 - DNA, 123 bp, synthetic construct
  source 1..123: mol_type = other DNA
gtaacggcagacttctccacgttttagagctagaaatagcaagttaaaataaggctagtccgttatcaacttgaaaaagtggcaccgagtcggtgctgactcctgaggagaagtctgccgtta

SEQ ID NO: 20393 - DNA, 122 bp, synthetic construct
  source 1..122: mol_type = other DNA
gtaacggcagacttctccacgttttagagctagaaatagcaagttaaaataaggctagtccgttatcaacttgaaaaagtggcaccgagtcggtgctgactcctgaggagaagtctgccgtt

SEQ ID NO: 20394 - DNA, 121 bp, synthetic construct
  source 1..121: mol_type = other DNA
gtaacggcagacttctccacgttttagagctagaaatagcaagttaaaataaggctagtccgttatcaacttgaaaaagtggcaccgagtcggtgctgactcctgaggagaagtctgccgt

SEQ ID NO: 20395 - DNA, 120 bp, synthetic construct
  source 1..120: mol_type = other DNA
gtaacggcagacttctccacgttttagagctagaaatagcaagttaaaataaggctagtccgttatcaacttgaaaaagtggcaccgagtcggtgctgactcctgaggagaagtctgccg

SEQ ID NO: 20396 - DNA, 119 bp, synthetic construct
  source 1..119: mol_type = other DNA
gtaacggcagacttctccacgttttagagctagaaatagcaagttaaaataaggctagtccgttatcaacttgaaaaagtggcaccgagtcggtgctgactcctgaggagaagtctgcc

SEQ ID NO: 20397 - DNA, 118 bp, synthetic construct
  source 1..118: mol_type = other DNA
gtaacggcagacttctccacgttttagagctagaaatagcaagttaaaataaggctagtccgttatcaacttgaaaaagtggcaccgagtcggtgctgactcctgaggagaagtctgc

SEQ ID NO: 20398 - DNA, 117 bp, synthetic construct
  source 1..117: mol_type = other DNA
gtaacggcagacttctccacgttttagagctagaaatagcaagttaaaataaggctagtccgttatcaacttgaaaaagtggcaccgagtcggtgctgactcctgaggagaagtctg

SEQ ID NO: 20399 - DNA, 116 bp, synthetic construct
  source 1..116: mol_type = other DNA
gtaacggcagacttctccacgttttagagctagaaatagcaagttaaaataaggctagtccgttatcaacttgaaaaagtggcaccgagtcggtgctgactcctgaggagaagtct

SEQ ID NO: 20400 - DNA, 115 bp, synthetic construct
  source 1..115: mol_type = other DNA
gtaacggcagacttctccacgttttagagctagaaatagcaagttaaaataaggctagtccgttatcaacttgaaaaagtggcaccgagtcggtgctgactcctgaggagaagtc

SEQ ID NO: 20401 - DNA, 123 bp, synthetic construct
  source 1..123: mol_type = other DNA
gtaacggcagacttctccacgttttagagctagaaatagcaagttaaaataaggctagtccgttatcaacttgaaaaagtggcaccgagtcggtgcgactcctgaggagaagtctgccgttac

SEQ ID NO: 20402 - DNA, 122 bp, synthetic construct
  source 1..122: mol_type = other DNA
gtaacggcagacttctccacgttttagagctagaaatagcaagttaaaataaggctagtccgttatcaacttgaaaaagtggcaccgagtcggtgcgactcctgaggagaagtctgccgtta

SEQ ID NO: 20403 - DNA, 121 bp, synthetic construct
  source 1..121: mol_type = other DNA
gtaacggcagacttctccacgttttagagctagaaatagcaagttaaaataaggctagtccgttatcaacttgaaaaagtggcaccgagtcggtgcgactcctgaggagaagtctgccgtt

SEQ ID NO: 20404 - DNA, 120 bp, synthetic construct
  source 1..120: mol_type = other DNA
gtaacggcagacttctccacgttttagagctagaaatagcaagttaaaataaggctagtccgttatcaacttgaaaaagtggcaccgagtcggtgcgactcctgaggagaagtctgccgt

SEQ ID NO: 20405 - DNA, 119 bp, synthetic construct
  source 1..119: mol_type = other DNA
gtaacggcagacttctccacgttttagagctagaaatagcaagttaaaataaggctagtccgttatcaacttgaaaaagtggcaccgagtcggtgcgactcctgaggagaagtctgccg

SEQ ID NO: 20406 - DNA, 118 bp, synthetic construct
  source 1..118: mol_type = other DNA
gtaacggcagacttctccacgttttagagctagaaatagcaagttaaaataaggctagtccgttatcaacttgaaaaagtggcaccgagtcggtgcgactcctgaggagaagtctgcc

SEQ ID NO: 20407 - DNA, 117 bp, synthetic construct
  source 1..117: mol_type = other DNA
gtaacggcagacttctccacgttttagagctagaaatagcaagttaaaataaggctagtccgttatcaacttgaaaaagtggcaccgagtcggtgcgactcctgaggagaagtctgc

SEQ ID NO: 20408 - DNA, 116 bp, synthetic construct
  source 1..116: mol_type = other DNA
gtaacggcagacttctccacgttttagagctagaaatagcaagttaaaataaggctagtccgttatcaacttgaaaaagtggcaccgagtcggtgcgactcctgaggagaagtctg

SEQ ID NO: 20409 - DNA, 115 bp, synthetic construct
  source 1..115: mol_type = other DNA
gtaacggcagacttctccacgttttagagctagaaatagcaagttaaaataaggctagtccgttatcaacttgaaaaagtggcaccgagtcggtgcgactcctgaggagaagtct

SEQ ID NO: 20410 - DNA, 114 bp, synthetic construct
  source 1..114: mol_type = other DNA
gtaacggcagacttctccacgttttagagctagaaatagcaagttaaaataaggctagtccgttatcaacttgaaaaagtggcaccgagtcggtgcgactcctgaggagaagtc

SEQ ID NO: 20411 - DNA, 122 bp, synthetic construct
  source 1..122: mol_type = other DNA
gtaacggcagacttctccacgttttagagctagaaatagcaagttaaaataaggctagtccgttatcaacttgaaaaagtggcaccgagtcggtgcactcctgaggagaagtctgccgttac

SEQ ID NO: 20412 - DNA, 121 bp, synthetic construct
  source 1..121: mol_type = other DNA
gtaacggcagacttctccacgttttagagctagaaatagcaagttaaaataaggctagtccgttatcaacttgaaaaagtggcaccgagtcggtgcactcctgaggagaagtctgccgtta

SEQ ID NO: 20413 - DNA, 120 bp, synthetic construct
  source 1..120: mol_type = other DNA
gtaacggcagacttctccacgttttagagctagaaatagcaagttaaaataaggctagtccgttatcaacttgaaaaagtggcaccgagtcggtgcactcctgaggagaagtctgccgtt

SEQ ID NO: 20414 - DNA, 119 bp, synthetic construct
  source 1..119: mol_type = other DNA
gtaacggcagacttctccacgttttagagctagaaatagcaagttaaaataaggctagtccgttatcaacttgaaaaagtggcaccgagtcggtgcactcctgaggagaagtctgccgt

SEQ ID NO: 20415 - DNA, 118 bp, synthetic construct
  source 1..118: mol_type = other DNA
gtaacggcagacttctccacgttttagagctagaaatagcaagttaaaataaggctagtccgttatcaacttgaaaaagtggcaccgagtcggtgcactcctgaggagaagtctgccg

SEQ ID NO: 20416 - DNA, 117 bp, synthetic construct
  source 1..117: mol_type = other DNA
gtaacggcagacttctccacgttttagagctagaaatagcaagttaaaataaggctagtccgttatcaacttgaaaaagtggcaccgagtcggtgcactcctgaggagaagtctgcc

SEQ ID NO: 20417 - DNA, 116 bp, synthetic construct
  source 1..116: mol_type = other DNA
gtaacggcagacttctccacgttttagagctagaaatagcaagttaaaataaggctagtccgttatcaacttgaaaaagtggcaccgagtcggtgcactcctgaggagaagtctgc

SEQ ID NO: 20418 - DNA, 115 bp, synthetic construct
  source 1..115: mol_type = other DNA
gtaacggcagacttctccacgttttagagctagaaatagcaagttaaaataaggctagtccgttatcaacttgaaaaagtggcaccgagtcggtgcactcctgaggagaagtctg

SEQ ID NO: 20419 - DNA, 114 bp, synthetic construct
  source 1..114: mol_type = other DNA
gtaacggcagacttctccacgttttagagctagaaatagcaagttaaaataaggctagtccgttatcaacttgaaaaagtggcaccgagtcggtgcactcctgaggagaagtct

SEQ ID NO: 20420 - DNA, 113 bp, synthetic construct
  source 1..113: mol_type = other DNA
gtaacggcagacttctccacgttttagagctagaaatagcaagttaaaataaggctagtccgttatcaacttgaaaaagtggcaccgagtcggtgcactcctgaggagaagtc

SEQ ID NO: 20421 - RNA, 133 nt, synthetic construct
  source 1..133: mol_type = other RNA
  modified_base 1: mod_base = OTHER; note = 2'-O-methyl guanosine phosphorothioate
  modified_base 2: mod_base = OTHER; note = 2'-O-methyl uridine phosphorothioate
  modified_base 3: mod_base = OTHER; note = 2'-O-methyl adenosine phosphorothioate
  modified_base 130: mod_base = OTHER; note = uridine phosphorothioate
  modified_base 131: mod_base = OTHER; note = 2'-O-methyl uridine phosphorothioate
  modified_base 132: mod_base = OTHER; note = 2'-O-methyl adenosine phosphorothioate
  modified_base 133: mod_base = OTHER; note = 2'-O-methyl cytidine
gtaacggcagacttctccacgttttagagctagaaatagcaagttaaaataaggctagtccgttatcaacttgaaaaagtggcaccgagtcggtgctggtgcacctgactcctgaggagaagtctgccgttac

SEQ ID NO: 20422 - RNA, 132 nt, synthetic construct
  source 1..132: mol_type = other RNA
  modified_base 1: mod_base = OTHER; note = 2'-O-methyl guanosine phosphorothioate
  modified_base 2: mod_base = OTHER; note = 2'-O-methyl uridine phosphorothioate
  modified_base 3: mod_base = OTHER; note = 2'-O-methyl adenosine phosphorothioate
  modified_base 129: mod_base = OTHER; note = guanosine phosphorothioate
  modified_base 130: mod_base = OTHER; note = 2'-O-methyl uridine phosphorothioate
  modified_base 131: mod_base = OTHER; note = 2'-O-methyl uridine phosphorothioate
  modified_base 132: mod_base = OTHER; note = 2'-O-methyl adenosine
gtaacggcagacttctccacgttttagagctagaaatagcaagttaaaataaggctagtccgttatcaacttgaaaaagtggcaccgagtcggtgctggtgcacctgactcctgaggagaagtctgccgtta

SEQ ID NO: 20423 - RNA, 131 nt, synthetic construct
  source 1..131: mol_type = other RNA
  modified_base 1: mod_base = OTHER; note = 2'-O-methyl guanosine phosphorothioate
  modified_base 2: mod_base = OTHER; note = 2'-O-methyl uridine phosphorothioate
  modified_base 3: mod_base = OTHER; note = 2'-O-methyl adenosine phosphorothioate
  modified_base 128: mod_base = OTHER; note = cytidine phosphorothioate
  modified_base 129: mod_base = OTHER; note = 2'-O-methyl guanosine phosphorothioate
  modified_base 130: mod_base = OTHER; note = 2'-O-methyl uridine phosphorothioate
  modified_base 131: mod_base = OTHER; note = 2'-O-methyl uridine
gtaacggcagacttctccacgttttagagctagaaatagcaagttaaaataaggctagtccgttatcaacttgaaaaagtggcaccgagtcggtgctggtgcacctgactcctgaggagaagtctgccgtt

SEQ ID NO: 20424 - RNA, 130 nt, synthetic construct
  source 1..130: mol_type = other RNA
  modified_base 1: mod_base = OTHER; note = 2'-O-methyl guanosine phosphorothioate
  modified_base 2: mod_base = OTHER; note = 2'-O-methyl uridine phosphorothioate
  modified_base 3: mod_base = OTHER; note = 2'-O-methyl adenosine phosphorothioate
  modified_base 127: mod_base = OTHER; note = cytidine phosphorothioate
  modified_base 128: mod_base = OTHER; note = 2'-O-methyl cytidine phosphorothioate
  modified_base 129: mod_base = OTHER; note = 2'-O-methyl guanosine phosphorothioate
  modified_base 130: mod_base = OTHER; note = 2'-O-methyl uridine
gtaacggcagacttctccacgttttagagctagaaatagcaagttaaaataaggctagtccgttatcaacttgaaaaagtggcaccgagtcggtgctggtgcacctgactcctgaggagaagtctgccgt

SEQ ID NO: 20425 - RNA, 129 nt, synthetic construct
  source 1..129: mol_type = other RNA
  modified_base 1: mod_base = OTHER; note = 2'-O-methyl guanosine phosphorothioate
  modified_base 2: mod_base = OTHER; note = 2'-O-methyl uridine phosphorothioate
  modified_base 3: mod_base = OTHER; note = 2'-O-methyl adenosine phosphorothioate
  modified_base 126: mod_base = OTHER; note = guanosine phosphorothioate
  modified_base 127: mod_base = OTHER; note = 2'-O-methyl cytidine phosphorothioate
  modified_base 128: mod_base = OTHER; note = 2'-O-methyl cytidine phosphorothioate
  modified_base 129: mod_base = OTHER; note = 2'-O-methyl guanosine
gtaacggcagacttctccacgttttagagctagaaatagcaagttaaaataaggctagtccgttatcaacttgaaaaagtggcaccgagtcggtgctggtgcacctgactcctgaggagaagtctgccg

SEQ ID NO: 20426 - RNA, 128 nt, synthetic construct
  source 1..128: mol_type = other RNA
  modified_base 1: mod_base = OTHER; note = 2'-O-methyl guanosine phosphorothioate
  modified_base 2: mod_base = OTHER; note = 2'-O-methyl uridine phosphorothioate
  modified_base 3: mod_base = OTHER; note = 2'-O-methyl adenosine phosphorothioate
  modified_base 125: mod_base = OTHER; note = uridine phosphorothioate
  modified_base 126: mod_base = OTHER; note = 2'-O-methyl guanosine phosphorothioate
  modified_base 127: mod_base = OTHER; note = 2'-O-methyl cytidine phosphorothioate
  modified_base 128: mod_base = OTHER; note = 2'-O-methyl cytidine
gtaacggcagacttctccacgttttagagctagaaatagcaagttaaaataaggctagtccgttatcaacttgaaaaagtggcaccgagtcggtgctggtgcacctgactcctgaggagaagtctgcc

SEQ ID NO: 20427 - RNA, 127 nt, synthetic construct
  source 1..127: mol_type = other RNA
  modified_base 1: mod_base = OTHER; note = 2'-O-methyl guanosine phosphorothioate
  modified_base 2: mod_base = OTHER; note = 2'-O-methyl uridine phosphorothioate
  modified_base 3: mod_base = OTHER; note = 2'-O-methyl adenosine phosphorothioate
  modified_base 124: mod_base = OTHER; note = cytidine phosphorothioate
  modified_base 125: mod_base = OTHER; note = 2'-O-methyl uridine phosphorothioate
  modified_base 126: mod_base = OTHER; note = 2'-O-methyl guanosine phosphorothioate
  modified_base 127: mod_base = OTHER; note = 2'-O-methyl cytidine
gtaacggcagacttctccacgttttagagctagaaatagcaagttaaaataaggctagtccgttatcaacttgaaaaagtggcaccgagtcggtgctggtgcacctgactcctgaggagaagtctgc

SEQ ID NO: 20428 - RNA, 126 nt, synthetic construct
  source 1..126: mol_type = other RNA
  modified_base 1: mod_base = OTHER; note = 2'-O-methyl guanosine phosphorothioate
  modified_base 2: mod_base = OTHER; note = 2'-O-methyl uridine phosphorothioate
  modified_base 3: mod_base = OTHER; note = 2'-O-methyl adenosine phosphorothioate
  modified_base 123: mod_base = OTHER; note = uridine phosphorothioate
  modified_base 124: mod_base = OTHER; note = 2'-O-methyl cytidine phosphorothioate
  modified_base 125: mod_base = OTHER; note = 2'-O-methyl uridine phosphorothioate
  modified_base 126: mod_base = OTHER; note = 2'-O-methyl guanosine
gtaacggcagacttctccacgttttagagctagaaatagcaagttaaaataaggctagtccgttatcaacttgaaaaagtggcaccgagtcggtgctggtgcacctgactcctgaggagaagtctg

SEQ ID NO: 20429 - RNA, 125 nt, synthetic construct
  source 1..125: mol_type = other RNA
  modified_base 1: mod_base = OTHER; note = 2'-O-methyl guanosine phosphorothioate
  modified_base 2: mod_base = OTHER; note = 2'-O-methyl uridine phosphorothioate
  modified_base 3: mod_base = OTHER; note = 2'-O-methyl adenosine phosphorothioate
  modified_base 122: mod_base = OTHER; note = guanosine phosphorothioate
  modified_base 123: mod_base = OTHER; note = 2'-O-methyl uridine phosphorothioate
  modified_base 124: mod_base = OTHER; note = 2'-O-methyl cytidine phosphorothioate
  modified_base 125: mod_base = OTHER; note = 2'-O-methyl uridine
gtaacggcagacttctccacgttttagagctagaaatagcaagttaaaataaggctagtccgttatcaacttgaaaaagtggcaccgagtcggtgctggtgcacctgactcctgaggagaagtct

SEQ ID NO: 20430 - RNA, 124 nt, synthetic construct
  source 1..124: mol_type = other RNA
  modified_base 1: mod_base = OTHER; note = 2'-O-methyl guanosine phosphorothioate
  modified_base 2: mod_base = OTHER; note = 2'-O-methyl uridine phosphorothioate
  modified_base 3: mod_base = OTHER; note = 2'-O-methyl adenosine phosphorothioate
  modified_base 121: mod_base = OTHER; note = adenosine phosphorothioate
  modified_base 122: mod_base = OTHER; note = 2'-O-methyl guanosine phosphorothioate
  modified_base 123: mod_base = OTHER; note = 2'-O-methyl uridine phosphorothioate
  modified_base 124: mod_base = OTHER; note = 2'-O-methyl cytidine
gtaacggcagacttctccacgttttagagctagaaatagcaagttaaaataaggctagtccgttatcaacttgaaaaagtggcaccgagtcggtgctggtgcacctgactcctgaggagaagtc

SEQ ID NO: 20431 - RNA, 132 nt, synthetic construct
  source 1..132: mol_type = other RNA
  modified_base 1: mod_base = OTHER; note = 2'-O-methyl guanosine phosphorothioate
  modified_base 2: mod_base = OTHER; note = 2'-O-methyl uridine phosphorothioate
  modified_base 3: mod_base = OTHER; note = 2'-O-methyl adenosine phosphorothioate
  modified_base 129: mod_base = OTHER; note = uridine phosphorothioate
  modified_base 130: mod_base = OTHER; note = 2'-O-methyl uridine phosphorothioate
  modified_base 131: mod_base = OTHER; note = 2'-O-methyl adenosine phosphorothioate
  modified_base 132: mod_base = OTHER; note = 2'-O-methyl cytidine
gtaacggcagacttctccacgttttagagctagaaatagcaagttaaaataaggctagtccgttatcaacttgaaaaagtggcaccgagtcggtgcggtgcacctgactcctgaggagaagtctgccgttac

SEQ ID NO: 20432 - RNA, 131 nt, synthetic construct
  source 1..131: mol_type = other RNA
  modified_base 1: mod_base = OTHER; note = 2'-O-methyl guanosine phosphorothioate
  modified_base 2: mod_base = OTHER; note = 2'-O-methyl uridine phosphorothioate
  modified_base 3: mod_base = OTHER; note = 2'-O-methyl adenosine phosphorothioate
  modified_base 128: mod_base = OTHER; note = guanosine phosphorothioate
  modified_base 129: mod_base = OTHER; note = 2'-O-methyl uridine phosphorothioate
  modified_base 130: mod_base = OTHER; note = 2'-O-methyl uridine phosphorothioate
  modified_base 131: mod_base = OTHER; note = 2'-O-methyl adenosine
gtaacggcagacttctccacgttttagagctagaaatagcaagttaaaataaggctagtccgttatcaacttgaaaaagtggcaccgagtcggtgcggtgcacctgactcctgaggagaagtctgccgtta

SEQ ID NO: 20433 - RNA, 130 nt, synthetic construct
  source 1..130: mol_type = other RNA
  modified_base 1: mod_base = OTHER; note = 2'-O-methyl guanosine phosphorothioate
  modified_base 2: mod_base = OTHER; note = 2'-O-methyl uridine phosphorothioate
  modified_base 3: mod_base = OTHER; note = 2'-O-methyl adenosine phosphorothioate
  modified_base 127: mod_base = OTHER; note = cytidine phosphorothioate
  modified_base 128: mod_base = OTHER; note = 2'-O-methyl guanosine phosphorothioate
  modified_base 129: mod_base = OTHER; note = 2'-O-methyl uridine phosphorothioate
  modified_base 130: mod_base = OTHER; note = 2'-O-methyl uridine
gtaacggcagacttctccacgttttagagctagaaatagcaagttaaaataaggctagtccgttatcaacttgaaaaagtggcaccgagtcggtgcggtgcacctgactcctgaggagaagtctgccgtt

SEQ ID NO: 20434 - RNA, 129 nt, synthetic construct
  source 1..129: mol_type = other RNA
  modified_base 1: mod_base = OTHER; note = 2'-O-methyl guanosine phosphorothioate
  modified_base 2: mod_base = OTHER; note = 2'-O-methyl uridine phosphorothioate
  modified_base 3: mod_base = OTHER; note = 2'-O-methyl adenosine phosphorothioate
  modified_base 126: mod_base = OTHER; note = cytidine phosphorothioate
  modified_base 127: mod_base = OTHER; note = 2'-O-methyl cytidine phosphorothioate
  modified_base 128: mod_base = OTHER; note = 2'-O-methyl guanosine phosphorothioate
  modified_base 129: mod_base = OTHER; note = 2'-O-methyl uridine
gtaacggcagacttctccacgttttagagctagaaatagcaagttaaaataaggctagtccgttatcaacttgaaaaagtggcaccgagtcggtgcggtgcacctgactcctgaggagaagtctgccgt

SEQ ID NO: 20435 - RNA, 128 nt, synthetic construct
  source 1..128: mol_type = other RNA
  modified_base 1: mod_base = OTHER; note = 2'-O-methyl guanosine phosphorothioate
  modified_base 2: mod_base = OTHER; note = 2'-O-methyl uridine phosphorothioate
  modified_base 3: mod_base = OTHER; note = 2'-O-methyl adenosine phosphorothioate
  modified_base 125: mod_base = OTHER; note = guanosine phosphorothioate
  modified_base 126: mod_base = OTHER; note = 2'-O-methyl cytidine phosphorothioate
  modified_base 127: mod_base = OTHER; note = 2'-O-methyl cytidine phosphorothioate
  modified_base 128: mod_base = OTHER; note = 2'-O-methyl guanosine
gtaacggcagacttctccacgttttagagctagaaatagcaagttaaaataaggctagtccgttatcaacttgaaaaagtggcaccgagtcggtgcggtgcacctgactcctgaggagaagtctgccg

SEQ ID NO: 20436 - RNA, 127 nt, synthetic construct
  source 1..127: mol_type = other RNA
  modified_base 1: mod_base = OTHER; note = 2'-O-methyl guanosine phosphorothioate
  modified_base 2: mod_base = OTHER; note = 2'-O-methyl uridine phosphorothioate
  modified_base 3: mod_base = OTHER; note = 2'-O-methyl adenosine phosphorothioate
  modified_base 124: mod_base = OTHER; note = uridine phosphorothioate
  modified_base 125: mod_base = OTHER; note = 2'-O-methyl guanosine phosphorothioate
  modified_base 126: mod_base = OTHER; note = 2'-O-methyl cytidine phosphorothioate
  modified_base 127: mod_base = OTHER; note = 2'-O-methyl cytidine
gtaacggcagacttctccacgttttagagctagaaatagcaagttaaaataaggctagtccgttatcaacttgaaaaagtggcaccgagtcggtgcggtgcacctgactcctgaggagaagtctgcc

SEQ ID NO: 20437 - RNA, 126 nt, synthetic construct
  source 1..126: mol_type = other RNA
  modified_base 1: mod_base = OTHER; note = 2'-O-methyl guanosine phosphorothioate
  modified_base 2: mod_base = OTHER; note = 2'-O-methyl uridine phosphorothioate
  modified_base 3: mod_base = OTHER; note = 2'-O-methyl adenosine phosphorothioate
  modified_base 123: mod_base = OTHER; note = cytidine phosphorothioate
  modified_base 124: mod_base = OTHER; note = 2'-O-methyl uridine phosphorothioate
  modified_base 125: mod_base = OTHER; note = 2'-O-methyl guanosine phosphorothioate
  modified_base 126: mod_base = OTHER; note = 2'-O-methyl cytidine
gtaacggcagacttctccacgttttagagctagaaatagcaagttaaaataaggctagtccgttatcaacttgaaaaagtggcaccgagtcggtgcggtgcacctgactcctgaggagaagtctgc

SEQ ID NO: 20438 - RNA, 125 nt, synthetic construct
  source 1..125: mol_type = other RNA
  modified_base 1: mod_base = OTHER; note = 2'-O-methyl guanosine phosphorothioate
  modified_base 2: mod_base = OTHER; note = 2'-O-methyl uridine phosphorothioate
  modified_base 3: mod_base = OTHER; note = 2'-O-methyl adenosine phosphorothioate
  modified_base 122: mod_base = OTHER; note = uridine phosphorothioate
  modified_base 123: mod_base = OTHER; note = 2'-O-methyl cytidine phosphorothioate
  modified_base 124: mod_base = OTHER; note = 2'-O-methyl uridine phosphorothioate
  modified_base 125: mod_base = OTHER; note = 2'-O-methyl guanosine
gtaacggcagacttctccacgttttagagctagaaatagcaagttaaaataaggctagtccgttatcaacttgaaaaagtggcaccgagtcggtgcggtgcacctgactcctgaggagaagtctg

SEQ ID NO: 20439 - RNA, 124 nt, synthetic construct
  source 1..124: mol_type = other RNA
  modified_base 1: mod_base = OTHER; note = 2'-O-methyl guanosine phosphorothioate
  modified_base 2: mod_base = OTHER; note = 2'-O-methyl uridine phosphorothioate
  modified_base 3: mod_base = OTHER; note = 2'-O-methyl adenosine phosphorothioate
  modified_base 121: mod_base = OTHER; note = guanosine phosphorothioate
  modified_base 122: mod_base = OTHER; note = 2'-O-methyl uridine phosphorothioate
  modified_base 123: mod_base = OTHER; note = 2'-O-methyl cytidine phosphorothioate
  modified_base 124: mod_base = OTHER; note = 2'-O-methyl uridine
gtaacggcagacttctccacgttttagagctagaaatagcaagttaaaataaggctagtccgttatcaacttgaaaaagtggcaccgagtcggtgcggtgcacctgactcctgaggagaagtct

SEQ ID NO: 20440 - RNA, 123 nt, synthetic construct
  source 1..123: mol_type = other RNA
  modified_base 1: mod_base = OTHER; note = 2'-O-methyl guanosine phosphorothioate
  modified_base 2: mod_base = OTHER; note = 2'-O-methyl uridine phosphorothioate
  modified_base 3: mod_base = OTHER; note = 2'-O-methyl adenosine phosphorothioate
  modified_base 120: mod_base = OTHER; note = adenosine phosphorothioate
  modified_base 121: mod_base = OTHER; note = 2'-O-methyl guanosine phosphorothioate
  modified_base 122: mod_base = OTHER; note = 2'-O-methyl uridine phosphorothioate
  modified_base 123: mod_base = OTHER; note = 2'-O-methyl cytidine
gtaacggcagacttctccacgttttagagctagaaatagcaagttaaaataaggctagtccgttatcaacttgaaaaagtggcaccgagtcggtgcggtgcacctgactcctgaggagaagtc

SEQ ID NO: 20441 - RNA, 131 nt, synthetic construct
  source 1..131: mol_type = other RNA
  modified_base 1: mod_base = OTHER; note = 2'-O-methyl guanosine phosphorothioate
  modified_base 2: mod_base = OTHER; note = 2'-O-methyl uridine phosphorothioate
  modified_base 3: mod_base = OTHER; note = 2'-O-methyl adenosine phosphorothioate
  modified_base 128: mod_base = OTHER; note = uridine phosphorothioate
  modified_base 129: mod_base = OTHER; note = 2'-O-methyl uridine phosphorothioate
  modified_base 130: mod_base = OTHER; note = 2'-O-methyl adenosine phosphorothioate
  modified_base 131: mod_base = OTHER; note = 2'-O-methyl cytidine
gtaacggcagacttctccacgttttagagctagaaatagcaagttaaaataaggctagtccgttatcaacttgaaaaagtggcaccgagtcggtgcgtgcacctgactcctgaggagaagtctgccgttac

SEQ ID NO: 20442 - RNA, 130 nt, synthetic construct
  source 1..130: mol_type = other RNA
  modified_base 1: mod_base = OTHER; note = 2'-O-methyl guanosine phosphorothioate
  modified_base 2: mod_base = OTHER; note = 2'-O-methyl uridine phosphorothioate
  modified_base 3: mod_base = OTHER; note = 2'-O-methyl adenosine phosphorothioate
  modified_base 127: mod_base = OTHER; note = guanosine phosphorothioate
  modified_base 128: mod_base = OTHER; note = 2'-O-methyl uridine phosphorothioate
  modified_base 129: mod_base = OTHER; note = 2'-O-methyl uridine phosphorothioate
  modified_base 130: mod_base = OTHER; note = 2'-O-methyl adenosine
gtaacggcagacttctccacgttttagagctagaaatagcaagttaaaataaggctagtccgttatcaacttgaaaaagtggcaccgagtcggtgcgtgcacctgactcctgaggagaagtctgccgtta

SEQ ID NO: 20443 - RNA, 129 nt, synthetic construct
  source 1..129: mol_type = other RNA
  modified_base 1: mod_base = OTHER; note = 2'-O-methyl guanosine phosphorothioate
  modified_base 2: mod_base = OTHER; note = 2'-O-methyl uridine phosphorothioate
  modified_base 3: mod_base = OTHER; note = 2'-O-methyl adenosine phosphorothioate
  modified_base 126: mod_base = OTHER; note = cytidine phosphorothioate
  modified_base 127: mod_base = OTHER; note = 2'-O-methyl guanosine phosphorothioate
  modified_base 128: mod_base = OTHER; note = 2'-O-methyl uridine phosphorothioate
  modified_base 129: mod_base = OTHER; note = 2'-O-methyl uridine
gtaacggcagacttctccacgttttagagctagaaatagcaagttaaaataaggctagtccgttatcaacttgaaaaagtggcaccgagtcggtgcgtgcacctgactcctgaggagaagtctgccgtt

SEQ ID NO: 20444 - RNA, 128 nt, synthetic construct
  source 1..128: mol_type = other RNA
  modified_base 1: mod_base = OTHER; note = 2'-O-methyl guanosine phosphorothioate
  modified_base 2: mod_base = OTHER; note = 2'-O-methyl uridine phosphorothioate
  modified_base 3: mod_base = OTHER; note = 2'-O-methyl adenosine phosphorothioate
  modified_base 125: mod_base = OTHER; note = cytidine phosphorothioate
  modified_base 126: mod_base = OTHER; note = 2'-O-methyl cytidine phosphorothioate
  modified_base 127: mod_base = OTHER; note = 2'-O-methyl guanosine phosphorothioate
  modified_base 128: mod_base = OTHER; note = 2'-O-methyl uridine
gtaacggcagacttctccacgttttagagctagaaatagcaagttaaaataaggctagtccgttatcaacttgaaaaagtggcaccgagtcggtgcgtgcacctgactcctgaggagaagtctgccgt

SEQ ID NO: 20445 - RNA, 127 nt, synthetic construct
  source 1..127: mol_type = other RNA
  modified_base 1: mod_base = OTHER; note = 2'-O-methyl guanosine phosphorothioate
  modified_base 2: mod_base = OTHER; note = 2'-O-methyl uridine phosphorothioate
  modified_base 3: mod_base = OTHER; note = 2'-O-methyl adenosine phosphorothioate
  modified_base 124: mod_base = OTHER; note = guanosine phosphorothioate
  modified_base 125: mod_base = OTHER; note = 2'-O-methyl cytidine phosphorothioate
  modified_base 126: mod_base = OTHER; note = 2'-O-methyl cytidine phosphorothioate
  modified_base 127: mod_base = OTHER; note = 2'-O-methyl guanosine
gtaacggcagacttctccacgttttagagctagaaatagcaagttaaaataaggctagtccgttatcaacttgaaaaagtggcaccgagtcggtgcgtgcacctgactcctgaggagaagtctgccg

SEQ ID NO: 20446 - RNA, 126 nt, synthetic construct
  source 1..126: mol_type = other RNA
  modified_base 1: mod_base = OTHER; note = 2'-O-methyl guanosine phosphorothioate
  modified_base 2: mod_base = OTHER; note = 2'-O-methyl uridine phosphorothioate
  modified_base 3: mod_base = OTHER; note = 2'-O-methyl adenosine phosphorothioate
  modified_base 123: mod_base = OTHER; note = uridine phosphorothioate
  modified_base 124: mod_base = OTHER; note = 2'-O-methyl guanosine phosphorothioate
  modified_base 125: mod_base = OTHER; note = 2'-O-methyl cytidine phosphorothioate
  modified_base 126: mod_base = OTHER; note = 2'-O-methyl cytidine
gtaacggcagacttctccacgttttagagctagaaatagcaagttaaaataaggctagtccgttatcaacttgaaaaagtggcaccgagtcggtgcgtgcacctgactcctgaggagaagtctgcc

SEQ ID NO: 20447 - RNA, 125 nt, synthetic construct
  source 1..125: mol_type = other RNA
  modified_base 1: mod_base = OTHER; note = 2'-O-methyl guanosine phosphorothioate
  modified_base 2: mod_base = OTHER; note = 2'-O-methyl uridine phosphorothioate
  modified_base 3: mod_base = OTHER; note = 2'-O-methyl adenosine phosphorothioate
  modified_base 122: mod_base = OTHER; note = cytidine phosphorothioate
  modified_base 123: mod_base = OTHER; note = 2'-O-methyl uridine phosphorothioate
  modified_base 124: mod_base = OTHER; note = 2'-O-methyl guanosine phosphorothioate
  modified_base 125: mod_base = OTHER; note = 2'-O-methyl cytidine
gtaacggcagacttctccacgttttagagctagaaatagcaagttaaaataaggctagtccgttatcaacttgaaaaagtggcaccgagtcggtgcgtgcacctgactcctgaggagaagtctgc

SEQ ID NO: 20448 - RNA, 124 nt, synthetic construct
  source 1..124: mol_type = other RNA
  modified_base 1: mod_base = OTHER; note = 2'-O-methyl guanosine phosphorothioate
  modified_base 2: mod_base = OTHER; note = 2'-O-methyl uridine phosphorothioate
  modified_base 3: mod_base = OTHER; note = 2'-O-methyl adenosine phosphorothioate
  modified_base 121: mod_base = OTHER; note = uridine phosphorothioate
  modified_base 122: mod_base = OTHER; note = 2'-O-methyl cytidine phosphorothioate
  modified_base 123: mod_base = OTHER; note = 2'-O-methyl uridine phosphorothioate
  modified_base 124: mod_base = OTHER; note = 2'-O-methyl guanosine
gtaacggcagacttctccacgttttagagctagaaatagcaagttaaaataaggctagtccgttatcaacttgaaaaagtggcaccgagtcggtgcgtgcacctgactcctgaggagaagtctg

SEQ ID NO: 20449 - RNA, 123 nt, synthetic construct
  source 1..123: mol_type = other RNA
  modified_base 1: mod_base = OTHER; note = 2'-O-methyl guanosine phosphorothioate
  modified_base 2: mod_base = OTHER; note = 2'-O-methyl uridine phosphorothioate
  modified_base 3: mod_base = OTHER; note = 2'-O-methyl adenosine phosphorothioate
  modified_base 120: mod_base = OTHER; note = guanosine phosphorothioate
  modified_base 121: mod_base = OTHER; note = 2'-O-methyl uridine phosphorothioate
  modified_base 122: mod_base = OTHER; note = 2'-O-methyl cytidine phosphorothioate
  modified_base 123: mod_base = OTHER; note = 2'-O-methyl uridine
gtaacggcagacttctccacgttttagagctagaaatagcaagttaaaataaggctagtccgttatcaacttgaaaaagtggcaccgagtcggtgcgtgcacctgactcctgaggagaagtct

SEQ ID NO: 20450 - RNA, 122 nt, synthetic construct
  source 1..122: mol_type = other RNA
  modified_base 1: mod_base = OTHER; note = 2'-O-methyl guanosine phosphorothioate
  modified_base 2: mod_base = OTHER; note = 2'-O-methyl uridine phosphorothioate
  modified_base 3: mod_base = OTHER; note = 2'-O-methyl adenosine phosphorothioate
  modified_base 119: mod_base = OTHER; note = adenosine phosphorothioate
  modified_base 120: mod_base = OTHER; note = 2'-O-methyl guanosine phosphorothioate
  modified_base 121: mod_base = OTHER; note = 2'-O-methyl uridine phosphorothioate
  modified_base 122: mod_base = OTHER; note = 2'-O-methyl cytidine
gtaacggcagacttctccacgttttagagctagaaatagcaagttaaaataaggctagtccgttatcaacttgaaaaagtggcaccgagtcggtgcgtgcacctgactcctgaggagaagtc

SEQ ID NO: 20451 - RNA, 130 nt, synthetic construct
  source 1..130: mol_type = other RNA
  modified_base 1: mod_base = OTHER; note = 2'-O-methyl guanosine phosphorothioate
  modified_base 2: mod_base = OTHER; note = 2'-O-methyl uridine phosphorothioate
  modified_base 3: mod_base = OTHER; note = 2'-O-methyl adenosine phosphorothioate
  modified_base 127: mod_base = OTHER; note = uridine phosphorothioate
  modified_base 128: mod_base = OTHER; note = 2'-O-methyl uridine phosphorothioate
  modified_base 129: mod_base = OTHER; note = 2'-O-methyl adenosine phosphorothioate
  modified_base 130: mod_base = OTHER; note = 2'-O-methyl cytidine
gtaacggcagacttctccacgttttagagctagaaatagcaagttaaaataaggctagtccgttatcaacttgaaaaagtggcaccgagtcggtgctgcacctgactcctgaggagaagtctgccgttac

SEQ ID NO: 20452 - RNA, 129 nt, synthetic construct
  source 1..129: mol_type = other RNA
  modified_base 1: mod_base = OTHER; note = 2'-O-methyl guanosine phosphorothioate
  modified_base 2: mod_base = OTHER; note = 2'-O-methyl uridine phosphorothioate
  modified_base 3: mod_base = OTHER; note = 2'-O-methyl adenosine phosphorothioate
  modified_base 126: mod_base = OTHER; note = guanosine phosphorothioate
  modified_base 127: mod_base = OTHER; note = 2'-O-methyl uridine phosphorothioate
  modified_base 128: mod_base = OTHER; note = 2'-O-methyl uridine phosphorothioate
  modified_base 129: mod_base = OTHER; note = 2'-O-methyl adenosine
gtaacggcagacttctccacgttttagagctagaaatagcaagttaaaataaggctagtccgttatcaacttgaaaaagtggcaccgagtcggtgctgcacctgactcctgaggagaagtctgccgtta

SEQ ID NO: 20453 - RNA, 128 nt, synthetic construct
  source 1..128: mol_type = other RNA
  modified_base 1: mod_base = OTHER; note = 2'-O-methyl guanosine phosphorothioate
  modified_base 2: mod_base = OTHER; note = 2'-O-methyl uridine phosphorothioate
  modified_base 3: mod_base = OTHER; note = 2'-O-methyl adenosine phosphorothioate
  modified_base 125: mod_base = OTHER; note = cytidine phosphorothioate
  modified_base 126: mod_base = OTHER; note = 2'-O-methyl guanosine phosphorothioate
  modified_base 127: mod_base = OTHER; note = 2'-O-methyl uridine phosphorothioate
  modified_base 128: mod_base = OTHER; note = 2'-O-methyl uridine
gtaacggcagacttctccacgttttagagctagaaatagcaagttaaaataaggctagtccgttatcaacttgaaaaagtggcaccgagtcggtgctgcacctgactcctgaggagaagtctgccgtt

SEQ ID NO: 20454 - RNA, 127 nt, synthetic construct
  source 1..127: mol_type = other RNA
  modified_base 1: mod_base = OTHER; note = 2'-O-methyl guanosine phosphorothioate
  modified_base 2: mod_base = OTHER; note = 2'-O-methyl uridine phosphorothioate
  modified_base 3: mod_base = OTHER; note = 2'-O-methyl adenosine phosphorothioate
  modified_base 124: mod_base = OTHER; note = cytidine phosphorothioate
  modified_base 125: mod_base = OTHER; note = 2'-O-methyl cytidine phosphorothioate
  modified_base 126: mod_base = OTHER; note = 2'-O-methyl guanosine phosphorothioate
  modified_base 127: mod_base = OTHER; note = 2'-O-methyl uridine
gtaacggcagacttctccacgttttagagctagaaatagcaagttaaaataaggctagtccgttatcaacttgaaaaagtggcaccgagtcggtgctgcacctgactcctgaggagaagtctgccgt

SEQ ID NO: 20455 - RNA, 126 nt, synthetic construct
  source 1..126: mol_type = other RNA
  modified_base 1: mod_base = OTHER; note = 2'-O-methyl guanosine phosphorothioate
  modified_base 2: mod_base = OTHER; note = 2'-O-methyl uridine phosphorothioate
  modified_base 3: mod_base = OTHER; note = 2'-O-methyl adenosine phosphorothioate
  modified_base 123: mod_base = OTHER; note = guanosine phosphorothioate
  modified_base 124: mod_base = OTHER; note = 2'-O-methyl cytidine phosphorothioate
  modified_base 125: mod_base = OTHER; note = 2'-O-methyl cytidine phosphorothioate
  modified_base 126: mod_base = OTHER; note = 2'-O-methyl guanosine
gtaacggcagacttctccacgttttagagctagaaatagcaagttaaaataaggctagtccgttatcaacttgaaaaagtggcaccgagtcggtgctgcacctgactcctgaggagaagtctgccg

SEQ ID NO: 20456 - RNA, 125 nt, synthetic construct
  source 1..125: mol_type = other RNA
  modified_base 1: mod_base = OTHER; note = 2'-O-methyl guanosine phosphorothioate
  modified_base 2: mod_base = OTHER; note = 2'-O-methyl uridine phosphorothioate
  modified_base 3: mod_base = OTHER; note = 2'-O-methyl adenosine phosphorothioate
  modified_base 122: mod_base = OTHER; note = uridine phosphorothioate
  modified_base 123: mod_base = OTHER; note = 2'-O-methyl guanosine phosphorothioate
  modified_base 124: mod_base = OTHER; note = 2'-O-methyl cytidine phosphorothioate
  modified_base 125: mod_base = OTHER; note = 2'-O-methyl cytidine
gtaacggcagacttctccacgttttagagctagaaatagcaagttaaaataaggctagtccgttatcaacttgaaaaagtggcaccgagtcggtgctgcacctgactcctgaggagaagtctgcc

SEQ ID NO: 20457 - RNA, 124 nt, synthetic construct
  source 1..124: mol_type = other RNA
  modified_base 1: mod_base = OTHER; note = 2'-O-methyl guanosine phosphorothioate
  modified_base 2: mod_base = OTHER; note = 2'-O-methyl uridine phosphorothioate
  modified_base 3: mod_base = OTHER; note = 2'-O-methyl adenosine phosphorothioate
  modified_base 121: mod_base = OTHER; note = cytidine phosphorothioate
  modified_base 122: mod_base = OTHER; note = 2'-O-methyl uridine phosphorothioate
  modified_base 123: mod_base = OTHER; note = 2'-O-methyl guanosine phosphorothioate
  modified_base 124: mod_base = OTHER; note = 2'-O-methyl cytidine
gtaacggcagacttctccacgttttagagctagaaatagcaagttaaaataaggctagtccgttatcaacttgaaaaagtggcaccgagtcggtgctgcacctgactcctgaggagaagtctgc

SEQ ID NO: 20458 - RNA, 123 nt, synthetic construct
  source 1..123: mol_type = other RNA
  modified_base 1: mod_base = OTHER; note = 2'-O-methyl guanosine phosphorothioate
  modified_base 2: mod_base = OTHER; note = 2'-O-methyl uridine phosphorothioate
  modified_base 3: mod_base = OTHER; note = 2'-O-methyl adenosine phosphorothioate
  modified_base 120: mod_base = OTHER; note = uridine phosphorothioate
  modified_base 121: mod_base = OTHER; note = 2'-O-methyl cytidine phosphorothioate
  modified_base 122: mod_base = OTHER; note = 2'-O-methyl uridine phosphorothioate
  modified_base 123: mod_base = OTHER; note = 2'-O-methyl guanosine
gtaacggcagacttctccacgttttagagctagaaatagcaagttaaaataaggctagtccgttatcaacttgaaaaagtggcaccgagtcggtgctgcacctgactcctgaggagaagtctg

SEQ ID NO: 20459 - RNA, 122 nt, synthetic construct
  source 1..122: mol_type = other RNA
  modified_base 1: mod_base = OTHER; note = 2'-O-methyl guanosine phosphorothioate
  modified_base 2: mod_base = OTHER; note = 2'-O-methyl uridine phosphorothioate
  modified_base 3: mod_base = OTHER; note = 2'-O-methyl adenosine phosphorothioate
  modified_base 119: mod_base = OTHER; note = guanosine phosphorothioate
  modified_base 120: mod_base = OTHER; note = 2'-O-methyl uridine phosphorothioate
  modified_base 121: mod_base = OTHER; note = 2'-O-methyl cytidine phosphorothioate
  modified_base 122: mod_base = OTHER; note = 2'-O-methyl uridine
gtaacggcagacttctccacgttttagagctagaaatagcaagttaaaataaggctagtccgttatcaacttgaaaaagtggcaccgagtcggtgctgcacctgactcctgaggagaagtct

SEQ ID NO: 20460 - RNA, 121 nt, synthetic construct
  source 1..121: mol_type = other RNA
  modified_base 1: mod_base = OTHER; note = 2'-O-methyl guanosine phosphorothioate
  modified_base 2: mod_base = OTHER; note = 2'-O-methyl uridine phosphorothioate
  modified_base 3: mod_base = OTHER; note = 2'-O-methyl adenosine phosphorothioate
  modified_base 118: mod_base = OTHER; note = adenosine phosphorothioate
  modified_base 119: mod_base = OTHER; note = 2'-O-methyl guanosine phosphorothioate
  modified_base 120: mod_base = OTHER; note = 2'-O-methyl uridine phosphorothioate
  modified_base 121: mod_base = OTHER; note = 2'-O-methyl cytidine
gtaacggcagacttctccacgttttagagctagaaatagcaagttaaaataaggctagtccgttatcaacttgaaaaagtggcaccgagtcggtgctgcacctgactcctgaggagaagtc

SEQ ID NO: 20461 - RNA, 129 nt, synthetic construct
  source 1..129: mol_type = other RNA
  modified_base 1: mod_base = OTHER; note = 2'-O-methyl guanosine phosphorothioate
  modified_base 2: mod_base = OTHER; note = 2'-O-methyl uridine phosphorothioate
  modified_base 3: mod_base = OTHER; note = 2'-O-methyl adenosine phosphorothioate
  modified_base 126: mod_base = OTHER; note = uridine phosphorothioate
  modified_base 127: mod_base = OTHER; note = 2'-O-methyl uridine phosphorothioate
  modified_base 128: mod_base = OTHER; note = 2'-O-methyl adenosine phosphorothioate
  modified_base 129: mod_base = OTHER; note = 2'-O-methyl cytidine
gtaacggcagacttctccacgttttagagctagaaatagcaagttaaaataaggctagtccgttatcaacttgaaaaagtggcaccgagtcggtgcgcacctgactcctgaggagaagtctgccgttac

SEQ ID NO: 20462 - RNA, 128 nt, synthetic construct
  source 1..128: mol_type = other RNA
  modified_base 1: mod_base = OTHER; note = 2'-O-methyl guanosine phosphorothioate
  modified_base 2: mod_base = OTHER; note = 2'-O-methyl uridine phosphorothioate
  modified_base 3: mod_base = OTHER; note = 2'-O-methyl adenosine phosphorothioate
  modified_base 125: mod_base = OTHER; note = guanosine phosphorothioate
  modified_base 126: mod_base = OTHER; note = 2'-O-methyl uridine phosphorothioate
  modified_base 127: mod_base = OTHER; note = 2'-O-methyl uridine phosphorothioate
  modified_base 128: mod_base = OTHER; note = 2'-O-methyl adenosine
gtaacggcagacttctccacgttttagagctagaaatagcaagttaaaataaggctagtccgttatcaacttgaaaaagtggcaccgagtcggtgcgcacctgactcctgaggagaagtctgccgtta

SEQ ID NO: 20463 - RNA, 127 nt, synthetic construct
  source 1..127: mol_type = other RNA
  modified_base 1: mod_base = OTHER; note = 2'-O-methyl guanosine phosphorothioate
  modified_base 2: mod_base = OTHER; note = 2'-O-methyl uridine phosphorothioate
  modified_base 3: mod_base = OTHER; note = 2'-O-methyl adenosine phosphorothioate
  modified_base 124: mod_base = OTHER; note = cytidine phosphorothioate
  modified_base 125: mod_base = OTHER; note = 2'-O-methyl guanosine phosphorothioate
  modified_base 126: mod_base = OTHER; note = 2'-O-methyl uridine phosphorothioate
  modified_base 127: mod_base = OTHER; note = 2'-O-methyl uridine
gtaacggcagacttctccacgttttagagctagaaatagcaagttaaaataaggctagtccgttatcaacttgaaaaagtggcaccgagtcggtgcgcacctgactcctgaggagaagtctgccgtt

SEQ ID NO: 20464 - RNA, 126 nt, synthetic construct
  source 1..126: mol_type = other RNA
  modified_base 1: mod_base = OTHER; note = 2'-O-methyl guanosine phosphorothioate
  modified_base 2: mod_base = OTHER; note = 2'-O-methyl uridine phosphorothioate
  modified_base 3: mod_base = OTHER; note = 2'-O-methyl adenosine phosphorothioate
  modified_base 123: mod_base = OTHER; note = cytidine phosphorothioate
  modified_base 124: mod_base = OTHER; note = 2'-O-methyl cytidine phosphorothioate
  modified_base 125: mod_base = OTHER; note = 2'-O-methyl guanosine phosphorothioate
  modified_base 126: mod_base = OTHER; note = 2'-O-methyl uridine
gtaacggcagacttctccacgttttagagctagaaatagcaagttaaaataaggctagtccgttatcaacttgaaaaagtggcaccgagtcggtgcgcacctgactcctgaggagaagtctgccgt

SEQ ID NO: 20465 - RNA, 125 nt, synthetic construct
  source 1..125: mol_type = other RNA
  modified_base 1: mod_base = OTHER; note = 2'-O-methyl guanosine phosphorothioate
  modified_base 2: mod_base = OTHER; note = 2'-O-methyl uridine phosphorothioate
  modified_base 3: mod_base = OTHER; note = 2'-O-methyl adenosine phosphorothioate
  modified_base 122: mod_base = OTHER; note = guanosine phosphorothioate
  modified_base 123: mod_base = OTHER; note = 2'-O-methyl cytidine phosphorothioate
  modified_base 124: mod_base = OTHER; note = 2'-O-methyl cytidine phosphorothioate
  modified_base 125: mod_base = OTHER; note = 2'-O-methyl guanosine
gtaacggcagacttctccacgttttagagctagaaatagcaagttaaaataaggctagtccgttatcaacttgaaaaagtggcaccgagtcggtgcgcacctgactcctgaggagaagtctgccg

SEQ ID NO: 20466 - RNA, 124 nt, synthetic construct
  source 1..124: mol_type = other RNA
  modified_base 1: mod_base = OTHER; note = 2'-O-methyl guanosine phosphorothioate
  modified_base 2: mod_base = OTHER; note = 2'-O-methyl uridine phosphorothioate
  modified_base 3: mod_base = OTHER; note = 2'-O-methyl adenosine phosphorothioate
  modified_base 121: mod_base = OTHER; note = uridine phosphorothioate
  modified_base 122: mod_base = OTHER; note = 2'-O-methyl guanosine phosphorothioate
  modified_base 123: mod_base = OTHER; note = 2'-O-methyl cytidine phosphorothioate
  modified_base 124: mod_base = OTHER; note = 2'-O-methyl cytidine
gtaacggcagacttctccacgttttagagctagaaatagcaagttaaaataaggctagtccgttatcaacttgaaaaagtggcaccgagtcggtgcgcacctgactcctgaggagaagtctgcc

SEQ ID NO: 20467 - RNA, 123 nt, synthetic construct
  source 1..123: mol_type = other RNA
  modified_base 1: mod_base = OTHER; note = 2'-O-methyl guanosine phosphorothioate
  modified_base 2: mod_base = OTHER; note = 2'-O-methyl uridine phosphorothioate
  modified_base 3: mod_base = OTHER; note = 2'-O-methyl adenosine phosphorothioate
  modified_base 120: mod_base = OTHER; note = cytidine phosphorothioate
  modified_base 121: mod_base = OTHER; note = 2'-O-methyl uridine phosphorothioate
  modified_base 122: mod_base = OTHER; note = 2'-O-methyl guanosine phosphorothioate
  modified_base 123: mod_base = OTHER; note = 2'-O-methyl cytidine
gtaacggcagacttctccacgttttagagctagaaatagcaagttaaaataaggctagtccgttatcaacttgaaaaagtggcaccgagtcggtgcgcacctgactcctgaggagaagtctgc

SEQ ID NO: 20468 - RNA, 122 nt, synthetic construct
  source 1..122: mol_type = other RNA
  modified_base 1: mod_base = OTHER; note = 2'-O-methyl guanosine phosphorothioate
  modified_base 2: mod_base = OTHER; note = 2'-O-methyl uridine phosphorothioate
  modified_base 3: mod_base = OTHER; note = 2'-O-methyl adenosine phosphorothioate
  modified_base 119: mod_base = OTHER; note = uridine phosphorothioate
  modified_base 120: mod_base = OTHER; note = 2'-O-methyl cytidine phosphorothioate
  modified_base 121: mod_base = OTHER; note = 2'-O-methyl uridine phosphorothioate
  modified_base 122: mod_base = OTHER; note = 2'-O-methyl guanosine
gtaacggcagacttctccacgttttagagctagaaatagcaagttaaaataaggctagtccgttatcaacttgaaaaagtggcaccgagtcggtgcgcacctgactcctgaggagaagtctg

SEQ ID NO: 20469 - RNA, 121 nt, synthetic construct
  source 1..121: mol_type = other RNA
  modified_base 1: mod_base = OTHER; note = 2'-O-methyl guanosine phosphorothioate
  modified_base 2: mod_base = OTHER; note = 2'-O-methyl uridine phosphorothioate
  modified_base 3: mod_base = OTHER; note = 2'-O-methyl adenosine phosphorothioate
  modified_base 118: mod_base = OTHER; note = guanosine phosphorothioate
  modified_base 119: mod_base = OTHER; note = 2'-O-methyl uridine phosphorothioate
  modified_base 120: mod_base = OTHER; note = 2'-O-methyl cytidine phosphorothioate
  modified_base 121: mod_base = OTHER; note = 2'-O-methyl uridine
gtaacggcagacttctccacgttttagagctagaaatagcaagttaaaataaggctagtccgttatcaacttgaaaaagtggcaccgagtcggtgcgcacctgactcctgaggagaagtct

SEQ ID NO: 20470 - RNA, 120 nt, synthetic construct
  source 1..120: mol_type = other RNA
  modified_base 1: mod_base = OTHER; note = 2'-O-methyl guanosine phosphorothioate
  modified_base 2: mod_base = OTHER; note = 2'-O-methyl uridine phosphorothioate
  modified_base 3: mod_base = OTHER; note = 2'-O-methyl adenosine phosphorothioate
  modified_base 117: mod_base = OTHER; note = adenosine phosphorothioate
  modified_base 118: mod_base = OTHER; note = 2'-O-methyl guanosine phosphorothioate
  modified_base 119: mod_base = OTHER; note = 2'-O-methyl uridine phosphorothioate
  modified_base 120: mod_base = OTHER; note = 2'-O-methyl cytidine
gtaacggcagacttctccacgttttagagctagaaatagcaagttaaaataaggctagtccgttatcaacttgaaaaagtggcaccgagtcggtgcgcacctgactcctgaggagaagtc

SEQ ID NO: 20471 - RNA, 127 nt, synthetic construct
  source 1..127: mol_type = other RNA
  modified_base 1: mod_base = OTHER; note = 2'-O-methyl guanosine phosphorothioate
  modified_base 2: mod_base = OTHER; note = 2'-O-methyl uridine phosphorothioate
  modified_base 3: mod_base = OTHER; note = 2'-O-methyl adenosine phosphorothioate
  modified_base 124: mod_base = OTHER; note = uridine phosphorothioate
  modified_base 125: mod_base = OTHER; note = 2'-O-methyl uridine phosphorothioate
  modified_base 126: mod_base = OTHER; note = 2'-O-methyl adenosine phosphorothioate
  modified_base 127: mod_base = OTHER; note = 2'-O-methyl cytidine
gtaacggcagacttctccacgttttagagctagaaatagcaagttaaaataaggctagtccgttatcaacttgaaaaagtggcaccgagtcggtgcacctgactcctgaggagaagtctgccgttac

SEQ ID NO: 20472 - RNA, 126 nt, synthetic construct
  source 1..126: mol_type = other RNA
  modified_base 1: mod_base = OTHER; note = 2'-O-methyl guanosine phosphorothioate
  modified_base 2: mod_base = OTHER; note = 2'-O-methyl uridine phosphorothioate
  modified_base 3: mod_base = OTHER; note = 2'-O-methyl adenosine phosphorothioate
  modified_base 123: mod_base = OTHER; note = guanosine phosphorothioate
  modified_base 124: mod_base = OTHER; note = 2'-O-methyl uridine phosphorothioate
  modified_base 125: mod_base = OTHER; note = 2'-O-methyl uridine phosphorothioate
  modified_base 126: mod_base = OTHER; note = 2'-O-methyl adenosine
gtaacggcagacttctccacgttttagagctagaaatagcaagttaaaataaggctagtccgttatcaacttgaaaaagtggcaccgagtcggtgcacctgactcctgaggagaagtctgccgtta

SEQ ID NO: 20473 - RNA, 125 nt, synthetic construct
  source 1..125: mol_type = other RNA
  modified_base 1: mod_base = OTHER; note = 2'-O-methyl guanosine phosphorothioate
  modified_base 2: mod_base = OTHER; note = 2'-O-methyl uridine phosphorothioate
  modified_base 3: mod_base = OTHER; note = 2'-O-methyl adenosine phosphorothioate
  modified_base 122: mod_base = OTHER; note = cytidine phosphorothioate
  modified_base 123: mod_base = OTHER; note = 2'-O-methyl guanosine phosphorothioate
  modified_base 124: mod_base = OTHER; note = 2'-O-methyl uridine phosphorothioate
  modified_base 125: mod_base = OTHER; note = 2'-O-methyl uridine
gtaacggcagacttctccacgttttagagctagaaatagcaagttaaaataaggctagtccgttatcaacttgaaaaagtggcaccgagtcggtgcacctgactcctgaggagaagtctgccgtt

SEQ ID NO: 20474 - RNA, 124 nt, synthetic construct
  source 1..124: mol_type = other RNA
  modified_base 1: mod_base = OTHER; note = 2'-O-methyl guanosine phosphorothioate
  modified_base 2: mod_base = OTHER; note = 2'-O-methyl uridine phosphorothioate
  modified_base 3: mod_base = OTHER; note = 2'-O-methyl adenosine phosphorothioate
  modified_base 121: mod_base = OTHER; note = cytidine phosphorothioate
  modified_base 122: mod_base = OTHER; note = 2'-O-methyl cytidine phosphorothioate
  modified_base 123: mod_base = OTHER; note = 2'-O-methyl guanosine phosphorothioate
  modified_base 124: mod_base = OTHER; note = 2'-O-methyl uridine
gtaacggcagacttctccacgttttagagctagaaatagcaagttaaaataaggctagtccgttatcaacttgaaaaagtggcaccgagtcggtgcacctgactcctgaggagaagtctgccgt

SEQ ID NO: 20475 - RNA, 123 nt, synthetic construct
  source 1..123: mol_type = other RNA
  modified_base 1: mod_base = OTHER; note = 2'-O-methyl guanosine phosphorothioate
  modified_base 2: mod_base = OTHER; note = 2'-O-methyl uridine phosphorothioate
  modified_base 3: mod_base = OTHER; note = 2'-O-methyl adenosine phosphorothioate
  modified_base 120: mod_base = OTHER; note = guanosine phosphorothioate
  modified_base 121: mod_base = OTHER; note = 2'-O-methyl cytidine phosphorothioate
  modified_base 122: mod_base = OTHER; note = 2'-O-methyl cytidine phosphorothioate
  modified_base 123: mod_base = OTHER; note = 2'-O-methyl guanosine
gtaacggcagacttctccacgttttagagctagaaatagcaagttaaaataaggctagtccgttatcaacttgaaaaagtggcaccgagtcggtgcacctgactcctgaggagaagtctgccg

SEQ ID NO: 20476 - RNA, 122 nt, synthetic construct
  source 1..122: mol_type = other RNA
  modified_base 1: mod_base = OTHER; note = 2'-O-methyl guanosine phosphorothioate
  modified_base 2: mod_base = OTHER; note = 2'-O-methyl uridine phosphorothioate
  modified_base 3: mod_base = OTHER; note = 2'-O-methyl adenosine phosphorothioate
  modified_base 119: mod_base = OTHER; note = uridine phosphorothioate
  modified_base 120: mod_base = OTHER; note = 2'-O-methyl guanosine phosphorothioate
  modified_base 121: mod_base = OTHER; note = 2'-O-methyl cytidine phosphorothioate
  modified_base 122: mod_base = OTHER; note = 2'-O-methyl cytidine
gtaacggcagacttctccacgttttagagctagaaatagcaagttaaaataaggctagtccgttatcaacttgaaaaagtggcaccgagtcggtgcacctgactcctgaggagaagtctgcc

SEQ ID NO: 20477 - RNA, 121 nt, synthetic construct
  source 1..121: mol_type = other RNA
  modified_base 1: mod_base = OTHER; note = 2'-O-methyl guanosine phosphorothioate
  modified_base 2: mod_base = OTHER; note = 2'-O-methyl uridine phosphorothioate
  modified_base 3: mod_base = OTHER; note = 2'-O-methyl adenosine phosphorothioate
  modified_base 118: mod_base = OTHER; note = cytidine phosphorothioate
  modified_base 119: mod_base = OTHER; note = 2'-O-methyl uridine phosphorothioate
  modified_base 120: mod_base = OTHER; note = 2'-O-methyl guanosine phosphorothioate
  modified_base 121: mod_base = OTHER; note = 2'-O-methyl cytidine
gtaacggcagacttctccacgttttagagctagaaatagcaagttaaaataaggctagtccgttatcaacttgaaaaagtggcaccgagtcggtgcacctgactcctgaggagaagtctgc

SEQ ID NO: 20478 - RNA, 120 nt, synthetic construct
  source 1..120: mol_type = other RNA
  modified_base 1: mod_base = OTHER; note = 2'-O-methyl guanosine phosphorothioate
  modified_base 2: mod_base = OTHER; note = 2'-O-methyl uridine phosphorothioate
  modified_base 3: mod_base = OTHER; note = 2'-O-methyl adenosine phosphorothioate
  modified_base 117: mod_base = OTHER; note = uridine phosphorothioate
  modified_base 118: mod_base = OTHER; note = 2'-O-methyl cytidine phosphorothioate
  modified_base 119: mod_base = OTHER; note = 2'-O-methyl uridine phosphorothioate
  modified_base 120: mod_base = OTHER; note = 2'-O-methyl guanosine
gtaacggcagacttctccacgttttagagctagaaatagcaagttaaaataaggctagtccgttatcaacttgaaaaagtggcaccgagtcggtgcacctgactcctgaggagaagtctg

SEQ ID NO: 20479 - RNA, 119 nt, synthetic construct
  source 1..119: mol_type = other RNA
  modified_base 1: mod_base = OTHER; note = 2'-O-methyl guanosine phosphorothioate
  modified_base 2: mod_base = OTHER; note = 2'-O-methyl uridine phosphorothioate
  modified_base 3: mod_base = OTHER; note = 2'-O-methyl adenosine phosphorothioate
  modified_base 116: mod_base = OTHER; note = guanosine phosphorothioate
  modified_base 117: mod_base = OTHER; note = 2'-O-methyl uridine phosphorothioate
  modified_base 118: mod_base = OTHER; note = 2'-O-methyl cytidine phosphorothioate
  modified_base 119: mod_base = OTHER; note = 2'-O-methyl uridine
gtaacggcagacttctccacgttttagagctagaaatagcaagttaaaataaggctagtccgttatcaacttgaaaaagtggcaccgagtcggtgcacctgactcctgaggagaagtct

SEQ ID NO: 20480 - RNA, 118 nt, synthetic construct
  source 1..118: mol_type = other RNA
  modified_base 1: mod_base = OTHER; note = 2'-O-methyl guanosine phosphorothioate
  modified_base 2: mod_base = OTHER; note = 2'-O-methyl uridine phosphorothioate
  modified_base 3: mod_base = OTHER; note = 2'-O-methyl adenosine phosphorothioate
  modified_base 115: mod_base = OTHER; note = adenosine phosphorothioate
  modified_base 116: mod_base = OTHER; note = 2'-O-methyl guanosine phosphorothioate
  modified_base 117: mod_base = OTHER; note = 2'-O-methyl uridine phosphorothioate
  modified_base 118: mod_base = OTHER; note = 2'-O-methyl cytidine
gtaacggcagacttctccacgttttagagctagaaatagcaagttaaaataaggctagtccgttatcaacttgaaaaagtggcaccgagtcggtgcacctgactcctgaggagaagtc

SEQ ID NO: 20481 - RNA, 124 nt, synthetic construct
  source 1..124: mol_type = other RNA
  modified_base 1: mod_base = OTHER; note = 2'-O-methyl guanosine phosphorothioate
  modified_base 2: mod_base = OTHER; note = 2'-O-methyl uridine phosphorothioate
  modified_base 3: mod_base = OTHER; note = 2'-O-methyl adenosine phosphorothioate
  modified_base 121: mod_base = OTHER; note = uridine phosphorothioate
  modified_base 122: mod_base = OTHER; note = 2'-O-methyl uridine phosphorothioate
  modified_base 123: mod_base = OTHER; note = 2'-O-methyl adenosine phosphorothioate
  modified_base 124: mod_base = OTHER; note = 2'-O-methyl cytidine
gtaacggcagacttctccacgttttagagctagaaatagcaagttaaaataaggctagtccgttatcaacttgaaaaagtggcaccgagtcggtgctgactcctgaggagaagtctgccgttac

SEQ ID NO: 20482 - RNA, 123 nt, synthetic construct
  source 1..123: mol_type = other RNA
  modified_base 1: mod_base = OTHER; note = 2'-O-methyl guanosine phosphorothioate
  modified_base 2: mod_base = OTHER; note = 2'-O-methyl uridine phosphorothioate
  modified_base 3: mod_base = OTHER; note = 2'-O-methyl adenosine phosphorothioate
  modified_base 120: mod_base = OTHER; note = guanosine phosphorothioate
  modified_base 121: mod_base = OTHER; note = 2'-O-methyl uridine phosphorothioate
  modified_base 122: mod_base = OTHER; note = 2'-O-methyl uridine phosphorothioate
  modified_base 123: mod_base = OTHER; note = 2'-O-methyl adenosine
gtaacggcagacttctccacgttttagagctagaaatagcaagttaaaataaggctagtccgttatcaacttgaaaaagtggcaccgagtcggtgctgactcctgaggagaagtctgccgtta

SEQ ID NO: 20483 - RNA, 122 nt, synthetic construct
  source 1..122: mol_type = other RNA
  modified_base 1: mod_base = OTHER; note = 2'-O-methyl guanosine phosphorothioate
  modified_base 2: mod_base = OTHER; note = 2'-O-methyl uridine phosphorothioate
  modified_base 3: mod_base = OTHER; note = 2'-O-methyl adenosine phosphorothioate
  modified_base 119: mod_base = OTHER; note = cytidine phosphorothioate
  modified_base 120: mod_base = OTHER; note = 2'-O-methyl guanosine phosphorothioate
  modified_base 121: mod_base = OTHER; note = 2'-O-methyl uridine phosphorothioate
  modified_base 122: mod_base = OTHER; note = 2'-O-methyl uridine
gtaacggcagacttctccacgttttagagctagaaatagcaagttaaaataaggctagtccgttatcaacttgaaaaagtggcaccgagtcggtgctgactcctgaggagaagtctgccgtt

SEQ ID NO: 20484 - RNA, 121 nt, synthetic construct
  source 1..121: mol_type = other RNA
  modified_base 1: mod_base = OTHER; note = 2'-O-methyl guanosine phosphorothioate
  modified_base 2: mod_base = OTHER; note = 2'-O-methyl uridine phosphorothioate
  modified_base 3: mod_base = OTHER; note = 2'-O-methyl adenosine phosphorothioate
  modified_base 118: mod_base = OTHER; note = cytidine phosphorothioate
  modified_base 119: mod_base = OTHER; note = 2'-O-methyl cytidine phosphorothioate
  modified_base 120: mod_base = OTHER; note = 2'-O-methyl guanosine phosphorothioate
  modified_base 121: mod_base = OTHER; note = 2'-O-methyl uridine
gtaacggcagacttctccacgttttagagctagaaatagcaagttaaaataaggctagtccgttatcaacttgaaaaagtggcaccgagtcggtgctgactcctgaggagaagtctgccgt

SEQ ID NO: 20485 - RNA, 120 nt, synthetic construct
  source 1..120: mol_type = other RNA
  modified_base 1: mod_base = OTHER; note = 2'-O-methyl guanosine phosphorothioate
  modified_base 2: mod_base = OTHER; note = 2'-O-methyl uridine phosphorothioate
  modified_base 3: mod_base = OTHER; note = 2'-O-methyl adenosine phosphorothioate
  modified_base 117: mod_base = OTHER; note = guanosine phosphorothioate
  modified_base 118: mod_base = OTHER; note = 2'-O-methyl cytidine phosphorothioate
  modified_base 119: mod_base = OTHER; note = 2'-O-methyl cytidine phosphorothioate
  modified_base 120: mod_base = OTHER; note = 2'-O-methyl guanosine
gtaacggcagacttctccacgttttagagctagaaatagcaagttaaaataaggctagtccgttatcaacttgaaaaagtggcaccgagtcggtgctgactcctgaggagaagtctgccg

SEQ ID NO: 20486 - RNA, 119 nt, synthetic construct
  source 1..119: mol_type = other RNA
  modified_base 1: mod_base = OTHER; note = 2'-O-methyl guanosine phosphorothioate
  modified_base 2: mod_base = OTHER; note = 2'-O-methyl uridine phosphorothioate
  modified_base 3: mod_base = OTHER; note = 2'-O-methyl adenosine phosphorothioate
  modified_base 116: mod_base = OTHER; note = uridine phosphorothioate
  modified_base 117: mod_base = OTHER; note = 2'-O-methyl guanosine phosphorothioate
  modified_base 118: mod_base = OTHER; note = 2'-O-methyl cytidine phosphorothioate
  modified_base 119: mod_base = OTHER; note = 2'-O-methyl cytidine
gtaacggcagacttctccacgttttagagctagaaatagcaagttaaaataaggctagtccgttatcaacttgaaaaagtggcaccgagtcggtgctgactcctgaggagaagtctgcc

SEQ ID NO: 20487 - RNA, 118 nt, synthetic construct
  source 1..118: mol_type = other RNA
  modified_base 1: mod_base = OTHER; note = 2'-O-methyl guanosine phosphorothioate
  modified_base 2: mod_base = OTHER; note = 2'-O-methyl uridine phosphorothioate
  modified_base 3: mod_base = OTHER; note = 2'-O-methyl adenosine phosphorothioate
  modified_base 115: mod_base = OTHER; note = cytidine phosphorothioate
  modified_base 116: mod_base = OTHER; note = 2'-O-methyl uridine phosphorothioate
  modified_base 117: mod_base = OTHER; note = 2'-O-methyl guanosine phosphorothioate
  modified_base 118: mod_base = OTHER; note = 2'-O-methyl cytidine
gtaacggcagacttctccacgttttagagctagaaatagcaagttaaaataaggctagtccgttatcaacttgaaaaagtggcaccgagtcggtgctgactcctgaggagaagtctgc

SEQ ID NO: 20488 - RNA, 117 nt, synthetic construct
  source 1..117: mol_type = other RNA
  modified_base 1: mod_base = OTHER; note = 2'-O-methyl guanosine phosphorothioate
  modified_base 2: mod_base = OTHER; note = 2'-O-methyl uridine phosphorothioate
  modified_base 3: mod_base = OTHER; note = 2'-O-methyl adenosine phosphorothioate
  modified_base 114: mod_base = OTHER; note = uridine phosphorothioate
  modified_base 115: mod_base = OTHER; note = 2'-O-methyl cytidine phosphorothioate
  modified_base 116: mod_base = OTHER; note = 2'-O-methyl uridine phosphorothioate
  modified_base 117: mod_base = OTHER; note = 2'-O-methyl guanosine
gtaacggcagacttctccacgttttagagctagaaatagcaagttaaaataaggctagtccgttatcaacttgaaaaagtggcaccgagtcggtgctgactcctgaggagaagtctg

SEQ ID NO: 20489 - RNA, 116 nt, synthetic construct
  source 1..116: mol_type = other RNA
  modified_base 1: mod_base = OTHER; note = 2'-O-methyl guanosine phosphorothioate
  modified_base 2: mod_base = OTHER; note = 2'-O-methyl uridine phosphorothioate
  modified_base 3: mod_base = OTHER; note = 2'-O-methyl adenosine phosphorothioate
  modified_base 113: mod_base = OTHER; note = guanosine phosphorothioate
  modified_base 114: mod_base = OTHER; note = 2'-O-methyl uridine phosphorothioate
  modified_base 115: mod_base = OTHER; note = 2'-O-methyl cytidine phosphorothioate
  modified_base 116: mod_base = OTHER; note = 2'-O-methyl uridine
gtaacggcagacttctccacgttttagagctagaaatagcaagttaaaataaggctagtccgttatcaacttgaaaaagtggcaccgagtcggtgctgactcctgaggagaagtct

SEQ ID NO: 20490 - RNA, 115 nt, synthetic construct
  source 1..115: mol_type = other RNA
  modified_base 1: mod_base = OTHER; note = 2'-O-methyl guanosine phosphorothioate
  modified_base 2: mod_base = OTHER; note = 2'-O-methyl uridine phosphorothioate
  modified_base 3: mod_base = OTHER; note = 2'-O-methyl adenosine phosphorothioate
  modified_base 112: mod_base = OTHER; note = adenosine phosphorothioate
  modified_base 113: mod_base = OTHER; note = 2'-O-methyl guanosine phosphorothioate
  modified_base 114: mod_base = OTHER; note = 2'-O-methyl uridine phosphorothioate
  modified_base 115: mod_base = OTHER; note = 2'-O-methyl cytidine
gtaacggcagacttctccacgttttagagctagaaatagcaagttaaaataaggctagtccgttatcaacttgaaaaagtggcaccgagtcggtgctgactcctgaggagaagtc

SEQ ID NO: 20491 - RNA, 123 nt, synthetic construct
  source 1..123: mol_type = other RNA
  modified_base 1: mod_base = OTHER; note = 2'-O-methyl guanosine phosphorothioate
  modified_base 2: mod_base = OTHER; note = 2'-O-methyl uridine phosphorothioate
  modified_base 3: mod_base = OTHER; note = 2'-O-methyl adenosine phosphorothioate
  modified_base 120: mod_base = OTHER; note = uridine phosphorothioate
  modified_base 121: mod_base = OTHER; note = 2'-O-methyl uridine phosphorothioate
  modified_base 122: mod_base = OTHER; note = 2'-O-methyl adenosine phosphorothioate
  modified_base 123: mod_base = OTHER; note = 2'-O-methyl cytidine
gtaacggcagacttctccacgttttagagctagaaatagcaagttaaaataaggctagtccgttatcaacttgaaaaagtggcaccgagtcggtgcgactcctgaggagaagtctgccgttac

SEQ ID NO: 20492 - RNA, 122 nt, synthetic construct
  source 1..122: mol_type = other RNA
  modified_base 1: mod_base = OTHER; note = 2'-O-methyl guanosine phosphorothioate
  modified_base 2: mod_base = OTHER; note = 2'-O-methyl uridine phosphorothioate
  modified_base 3: mod_base = OTHER; note = 2'-O-methyl adenosine phosphorothioate
  modified_base 119: mod_base = OTHER; note = guanosine phosphorothioate
  modified_base 120: mod_base = OTHER; note = 2'-O-methyl uridine phosphorothioate
  modified_base 121: mod_base = OTHER; note = 2'-O-methyl uridine phosphorothioate
  modified_base 122: mod_base = OTHER; note = 2'-O-methyl adenosine
gtaacggcagacttctccacgttttagagctagaaatagcaagttaaaataaggctagtccgttatcaacttgaaaaagtggcaccgagtcggtgcgactcctgaggagaagtctgccgtta

SEQ ID NO: 20493 - RNA, 121 nt, synthetic construct
  source 1..121: mol_type = other RNA
  modified_base 1: mod_base = OTHER; note = 2'-O-methyl guanosine phosphorothioate
  modified_base 2: mod_base = OTHER; note = 2'-O-methyl uridine phosphorothioate
  modified_base 3: mod_base = OTHER; note = 2'-O-methyl adenosine phosphorothioate
  modified_base 118: mod_base = OTHER; note = cytidine phosphorothioate
  modified_base 119: mod_base = OTHER; note = 2'-O-methyl guanosine phosphorothioate
  modified_base 120: mod_base = OTHER; note = 2'-O-methyl uridine phosphorothioate
  modified_base 121: mod_base = OTHER; note = 2'-O-methyl uridine
gtaacggcagacttctccacgttttagagctagaaatagcaagttaaaataaggctagtccgttatcaacttgaaaaagtggcaccgagtcggtgcgactcctgaggagaagtctgccgtt

SEQ ID NO: 20494 - RNA, 120 nt, synthetic construct
  source 1..120: mol_type = other RNA
  modified_base 1: mod_base = OTHER; note = 2'-O-methyl guanosine phosphorothioate
  modified_base 2: mod_base = OTHER; note = 2'-O-methyl uridine phosphorothioate
  modified_base 3: mod_base = OTHER; note = 2'-O-methyl adenosine phosphorothioate
  modified_base 117: mod_base = OTHER; note = cytidine phosphorothioate
  modified_base 118: mod_base = OTHER; note = 2'-O-methyl cytidine phosphorothioate
  modified_base 119: mod_base = OTHER; note = 2'-O-methyl guanosine phosphorothioate
  modified_base 120: mod_base = OTHER; note = 2'-O-methyl uridine
gtaacggcagacttctccacgttttagagctagaaatagcaagttaaaataaggctagtccgttatcaacttgaaaaagtggcaccgagtcggtgcgactcctgaggagaagtctgccgt

SEQ ID NO: 20495 - RNA, 119 nt, synthetic construct
  source 1..119: mol_type = other RNA
  modified_base 1: mod_base = OTHER; note = 2'-O-methyl guanosine phosphorothioate
  modified_base 2: mod_base = OTHER; note = 2'-O-methyl uridine phosphorothioate
  modified_base 3: mod_base = OTHER; note = 2'-O-methyl adenosine phosphorothioate
  modified_base 116: mod_base = OTHER; note = guanosine phosphorothioate
  modified_base 117: mod_base = OTHER; note = 2'-O-methyl cytidine phosphorothioate
  modified_base 118: mod_base = OTHER; note = 2'-O-methyl cytidine phosphorothioate
  modified_base 119: mod_base = OTHER; note = 2'-O-methyl guanosine
gtaacggcagacttctccacgttttagagctagaaatagcaagttaaaataaggctagtccgttatcaacttgaaaaagtggcaccgagtcggtgcgactcctgaggagaagtctgccg

SEQ ID NO: 20496 - RNA, 118 nt, synthetic construct
  source 1..118: mol_type = other RNA
  modified_base 1: mod_base = OTHER; note = 2'-O-methyl guanosine phosphorothioate
  modified_base 2: mod_base = OTHER; note = 2'-O-methyl uridine phosphorothioate
  modified_base 3: mod_base = OTHER; note = 2'-O-methyl adenosine phosphorothioate
  modified_base 115: mod_base = OTHER; note = uridine phosphorothioate
  modified_base 116: mod_base = OTHER; note = 2'-O-methyl guanosine phosphorothioate
  modified_base 117: mod_base = OTHER; note = 2'-O-methyl cytidine phosphorothioate
  modified_base 118: mod_base = OTHER; note = 2'-O-methyl cytidine
gtaacggcagacttctccacgttttagagctagaaatagcaagttaaaataaggctagtccgttatcaacttgaaaaagtggcaccgagtcggtgcgactcctgaggagaagtctgcc

SEQ ID NO: 20497 - RNA, 117 nt, synthetic construct
  source 1..117: mol_type = other RNA
  modified_base 1: mod_base = OTHER; note = 2'-O-methyl guanosine phosphorothioate
  modified_base 2: mod_base = OTHER; note = 2'-O-methyl uridine phosphorothioate
  modified_base 3: mod_base = OTHER; note = 2'-O-methyl adenosine phosphorothioate
  modified_base 114: mod_base = OTHER; note = cytidine phosphorothioate
  modified_base 115: mod_base = OTHER; note = 2'-O-methyl uridine phosphorothioate
  modified_base 116: mod_base = OTHER; note = 2'-O-methyl guanosine phosphorothioate
  modified_base 117: mod_base = OTHER; note = 2'-O-methyl cytidine
gtaacggcagacttctccacgttttagagctagaaatagcaagttaaaataaggctagtccgttatcaacttgaaaaagtggcaccgagtcggtgcgactcctgaggagaagtctgc

SEQ ID NO: 20498 - RNA, 116 nt, synthetic construct
  source 1..116: mol_type = other RNA
  modified_base 1: mod_base = OTHER; note = 2'-O-methyl guanosine phosphorothioate
  modified_base 2: mod_base = OTHER; note = 2'-O-methyl uridine phosphorothioate
  modified_base 3: mod_base = OTHER; note = 2'-O-methyl adenosine phosphorothioate
  modified_base 113: mod_base = OTHER; note = uridine phosphorothioate
  modified_base 114: mod_base = OTHER; note = 2'-O-methyl cytidine phosphorothioate
  modified_base 115: mod_base = OTHER; note = 2'-O-methyl uridine phosphorothioate
  modified_base 116: mod_base = OTHER; note = 2'-O-methyl guanosine
gtaacggcagacttctccacgttttagagctagaaatagcaagttaaaataaggctagtccgttatcaacttgaaaaagtggcaccgagtcggtgcgactcctgaggagaagtctg

SEQ ID NO: 20499 - RNA, 115 nt, synthetic construct
  source 1..115: mol_type = other RNA
  modified_base 1: mod_base = OTHER; note = 2'-O-methyl guanosine phosphorothioate
  modified_base 2: mod_base = OTHER; note = 2'-O-methyl uridine phosphorothioate
  modified_base 3: mod_base = OTHER; note = 2'-O-methyl adenosine phosphorothioate
  modified_base 112: mod_base = OTHER; note = guanosine phosphorothioate
  modified_base 113: mod_base = OTHER; note = 2'-O-methyl uridine phosphorothioate
  modified_base 114: mod_base = OTHER; note = 2'-O-methyl cytidine phosphorothioate
  modified_base 115: mod_base = OTHER; note = 2'-O-methyl uridine
gtaacggcagacttctccacgttttagagctagaaatagcaagttaaaataaggctagtccgttatcaacttgaaaaagtggcaccgagtcggtgcgactcctgaggagaagtct

SEQ ID NO: 20500 - RNA, 114 nt, synthetic construct
  source 1..114: mol_type = other RNA
  modified_base 1: mod_base = OTHER; note = 2'-O-methyl guanosine phosphorothioate
  modified_base 2: mod_base = OTHER; note = 2'-O-methyl uridine phosphorothioate
  modified_base 3: mod_base = OTHER; note = 2'-O-methyl adenosine phosphorothioate
  modified_base 111: mod_base = OTHER; note = adenosine phosphorothioate
  modified_base 112: mod_base = OTHER; note = 2'-O-methyl guanosine phosphorothioate
  modified_base 113: mod_base = OTHER; note = 2'-O-methyl uridine phosphorothioate
  modified_base 114: mod_base = OTHER; note = 2'-O-methyl cytidine
gtaacggcagacttctccacgttttagagctagaaatagcaagttaaaataaggctagtccgttatcaacttgaaaaagtggcaccgagtcggtgcgactcctgaggagaagtc

SEQ ID NO: 20501 - RNA, 122 nt, synthetic construct
  source 1..122: mol_type = other RNA
  modified_base 1: mod_base = OTHER; note = 2'-O-methyl guanosine phosphorothioate
  modified_base 2: mod_base = OTHER; note = 2'-O-methyl uridine phosphorothioate
  modified_base 3: mod_base = OTHER; note = 2'-O-methyl adenosine phosphorothioate
  modified_base 119: mod_base = OTHER; note = uridine phosphorothioate
  modified_base 120: mod_base = OTHER; note = 2'-O-methyl uridine phosphorothioate
  modified_base 121: mod_base = OTHER; note = 2'-O-methyl adenosine phosphorothioate
  modified_base 122: mod_base = OTHER; note = 2'-O-methyl cytidine
gtaacggcagacttctccacgttttagagctagaaatagcaagttaaaataaggctagtccgttatcaacttgaaaaagtggcaccgagtcggtgcactcctgaggagaagtctgccgttac

SEQ ID NO: 20502 - RNA, 121 nt, synthetic construct
  source 1..121: mol_type = other RNA
  modified_base 1: mod_base = OTHER; note = 2'-O-methyl guanosine phosphorothioate
  modified_base 2: mod_base = OTHER; note = 2'-O-methyl uridine phosphorothioate
  modified_base 3: mod_base = OTHER; note = 2'-O-methyl adenosine phosphorothioate
  modified_base 118: mod_base = OTHER; note = guanosine phosphorothioate
  modified_base 119: mod_base = OTHER; note = 2'-O-methyl uridine phosphorothioate
  modified_base 120: mod_base = OTHER; note = 2'-O-methyl uridine phosphorothioate
  modified_base 121: mod_base = OTHER; note = 2'-O-methyl adenosine
gtaacggcagacttctccacgttttagagctagaaatagcaagttaaaataaggctagtccgttatcaacttgaaaaagtggcaccgagtcggtgcactcctgaggagaagtctgccgtta

SEQ ID NO: 20503 - RNA, 120 nt, synthetic construct
  source 1..120: mol_type = other RNA
  modified_base 1: mod_base = OTHER; note = 2'-O-methyl guanosine phosphorothioate
  modified_base 2: mod_base = OTHER; note = 2'-O-methyl uridine phosphorothioate
  modified_base 3: mod_base = OTHER; note = 2'-O-methyl adenosine phosphorothioate
  modified_base 117: mod_base = OTHER; note = cytidine phosphorothioate
  modified_base 118: mod_base = OTHER; note = 2'-O-methyl guanosine phosphorothioate
  modified_base 119: mod_base = OTHER; note = 2'-O-methyl uridine phosphorothioate
  modified_base 120: mod_base = OTHER; note = 2'-O-methyl uridine
gtaacggcagacttctccacgttttagagctagaaatagcaagttaaaataaggctagtccgttatcaacttgaaaaagtggcaccgagtcggtgcactcctgaggagaagtctgccgtt

SEQ ID NO: 20504 - RNA, 119 nt, synthetic construct
  source 1..119: mol_type = other RNA
  modified_base 1: mod_base = OTHER; note = 2'-O-methyl guanosine phosphorothioate
  modified_base 2: mod_base = OTHER; note = 2'-O-methyl uridine phosphorothioate
  modified_base 3: mod_base = OTHER; note = 2'-O-methyl adenosine phosphorothioate
  modified_base 116: mod_base = OTHER; note = cytidine phosphorothioate
  modified_base 117: mod_base = OTHER; note = 2'-O-methyl cytidine phosphorothioate
  modified_base 118: mod_base = OTHER; note = 2'-O-methyl guanosine phosphorothioate
  modified_base 119: mod_base = OTHER; note = 2'-O-methyl uridine
gtaacggcagacttctccacgttttagagctagaaatagcaagttaaaataaggctagtccgttatcaacttgaaaaagtggcaccgagtcggtgcactcctgaggagaagtctgccgt

SEQ ID NO: 20505 - RNA, 118 nt, synthetic construct
  source 1..118: mol_type = other RNA
  modified_base 1: mod_base = OTHER; note = 2'-O-methyl guanosine phosphorothioate
  modified_base 2: mod_base = OTHER; note = 2'-O-methyl uridine phosphorothioate
  modified_base 3: mod_base = OTHER; note = 2'-O-methyl adenosine phosphorothioate
  modified_base 115: mod_base = OTHER; note = guanosine phosphorothioate
  modified_base 116: mod_base = OTHER; note = 2'-O-methyl cytidine phosphorothioate
  modified_base 117: mod_base = OTHER; note = 2'-O-methyl cytidine phosphorothioate
  modified_base 118: mod_base = OTHER; note = 2'-O-methyl guanosine
gtaacggcagacttctccacgttttagagctagaaatagcaagttaaaataaggctagtccgttatcaacttgaaaaagtggcaccgagtcggtgcactcctgaggagaagtctgccg

SEQ ID NO: 20506 - RNA, 117 nt, synthetic construct
  source 1..117: mol_type = other RNA
  modified_base 1: mod_base = OTHER; note = 2'-O-methyl guanosine phosphorothioate
  modified_base 2: mod_base = OTHER; note = 2'-O-methyl uridine phosphorothioate
  modified_base 3: mod_base = OTHER; note = 2'-O-methyl adenosine phosphorothioate
  modified_base 114: mod_base = OTHER; note = uridine phosphorothioate
  modified_base 115: mod_base = OTHER; note = 2'-O-methyl guanosine phosphorothioate
  modified_base 116: mod_base = OTHER; note = 2'-O-methyl cytidine phosphorothioate
  modified_base 117: mod_base = OTHER; note = 2'-O-methyl cytidine
gtaacggcagacttctccacgttttagagctagaaatagcaagttaaaataaggctagtccgttatcaacttgaaaaagtggcaccgagtcggtgcactcctgaggagaagtctgcc

SEQ ID NO: 20507 - RNA, 116 nt, synthetic construct
  source 1..116: mol_type = other RNA
  modified_base 1: mod_base = OTHER; note = 2'-O-methyl guanosine phosphorothioate
  modified_base 2: mod_base = OTHER; note = 2'-O-methyl uridine phosphorothioate
  modified_base 3: mod_base = OTHER; note = 2'-O-methyl adenosine phosphorothioate
  modified_base 113: mod_base = OTHER; note = cytidine phosphorothioate
  modified_base 114: mod_base = OTHER; note = 2'-O-methyl uridine phosphorothioate
  modified_base 115: mod_base = OTHER; note = 2'-O-methyl guanosine phosphorothioate
  modified_base 116: mod_base = OTHER; note = 2'-O-methyl cytidine
gtaacggcagacttctccacgttttagagctagaaatagcaagttaaaataaggctagtccgttatcaacttgaaaaagtggcaccgagtcggtgcactcctgaggagaagtctgc

SEQ ID NO: 20508 - RNA, 115 nt, synthetic construct
  source 1..115: mol_type = other RNA
  modified_base 1: mod_base = OTHER; note = 2'-O-methyl guanosine phosphorothioate
  modified_base 2: mod_base = OTHER; note = 2'-O-methyl uridine phosphorothioate
  modified_base 3: mod_base = OTHER; note = 2'-O-methyl adenosine phosphorothioate
  modified_base 112: mod_base = OTHER; note = uridine phosphorothioate
  modified_base 113: mod_base = OTHER; note = 2'-O-methyl cytidine phosphorothioate
  modified_base 114: mod_base = OTHER; note = 2'-O-methyl uridine phosphorothioate
  modified_base 115: mod_base = OTHER; note = 2'-O-methyl guanosine
gtaacggcagacttctccacgttttagagctagaaatagcaagttaaaataaggctagtccgttatcaacttgaaaaagtggcaccgagtcggtgcactcctgaggagaagtctg

SEQ ID NO: 20509 - RNA, 114 nt, synthetic construct
  source 1..114: mol_type = other RNA
  modified_base 1: mod_base = OTHER; note = 2'-O-methyl guanosine phosphorothioate
  modified_base 2: mod_base = OTHER; note = 2'-O-methyl uridine phosphorothioate
  modified_base 3: mod_base = OTHER; note = 2'-O-methyl adenosine phosphorothioate
  modified_base 111: mod_base = OTHER; note = guanosine phosphorothioate
  modified_base 112: mod_base = OTHER; note = 2'-O-methyl uridine phosphorothioate
  modified_base 113: mod_base = OTHER; note = 2'-O-methyl cytidine phosphorothioate
  modified_base 114: mod_base = OTHER; note = 2'-O-methyl uridine
gtaacggcagacttctccacgttttagagctagaaatagcaagttaaaataaggctagtccgttatcaacttgaaaaagtggcaccgagtcggtgcactcctgaggagaagtct

SEQ ID NO: 20510 - RNA, 113 nt, synthetic construct
  source 1..113: mol_type = other RNA
  modified_base 1: mod_base = OTHER; note = 2'-O-methyl guanosine phosphorothioate
  modified_base 2: mod_base = OTHER; note = 2'-O-methyl uridine phosphorothioate
  modified_base 3: mod_base = OTHER; note = 2'-O-methyl adenosine phosphorothioate
  modified_base 110: mod_base = OTHER; note = adenosine phosphorothioate
  modified_base 111: mod_base = OTHER; note = 2'-O-methyl guanosine phosphorothioate
  modified_base 112: mod_base = OTHER; note = 2'-O-methyl uridine phosphorothioate
  modified_base 113: mod_base = OTHER; note = 2'-O-methyl cytidine
gtaacggcagacttctccacgttttagagctagaaatagcaagttaaaataaggctagtccgttatcaacttgaaaaagtggcaccgagtcggtgcactcctgaggagaagtc

SEQ ID NO: 20511 - DNA, 133 bp, synthetic construct
  source 1..133: mol_type = other DNA
gtaacggcagacttctccacgttttagagctagaaatagcaagttaaaataaggctagtccgttatcaacttgaaaaagtggcaccgagtcggtgctggtgcatctgactcctgaggagaagtctgccgttac

SEQ ID NO: 20512 - DNA, 132 bp, synthetic construct
  source 1..132: mol_type = other DNA
gtaacggcagacttctccacgttttagagctagaaatagcaagttaaaataaggctagtccgttatcaacttgaaaaagtggcaccgagtcggtgctggtgcatctgactcctgaggagaagtctgccgtta

SEQ ID NO: 20513 - DNA, 131 bp, synthetic construct
  source 1..131: mol_type = other DNA
gtaacggcagacttctccacgttttagagctagaaatagcaagttaaaataaggctagtccgttatcaacttgaaaaagtggcaccgagtcggtgctggtgcatctgactcctgaggagaagtctgccgtt

SEQ ID NO: 20514 - DNA, 130 bp, synthetic construct
  source 1..130: mol_type = other DNA
gtaacggcagacttctccacgttttagagctagaaatagcaagttaaaataaggctagtccgttatcaacttgaaaaagtggcaccgagtcggtgctggtgcatctgactcctgaggagaagtctgccgt

SEQ ID NO: 20515 - DNA, 129 bp, synthetic construct
  source 1..129: mol_type = other DNA
gtaacggcagacttctccacgttttagagctagaaatagcaagttaaaataaggctagtccgttatcaacttgaaaaagtggcaccgagtcggtgctggtgcatctgactcctgaggagaagtctgccg

SEQ ID NO: 20516 - DNA, 128 bp, synthetic construct
  source 1..128: mol_type = other DNA
gtaacggcagacttctccacgttttagagctagaaatagcaagttaaaataaggctagtccgttatcaacttgaaaaagtggcaccgagtcggtgctggtgcatctgactcctgaggagaagtctgcc

SEQ ID NO: 20517 - DNA, 127 bp, synthetic construct
  source 1..127: mol_type = other DNA
gtaacggcagacttctccacgttttagagctagaaatagcaagttaaaataaggctagtccgttatcaacttgaaaaagtggcaccgagtcggtgctggtgcatctgactcctgaggagaagtctgc

SEQ ID NO: 20518 - DNA, 126 bp, synthetic construct
  source 1..126: mol_type = other DNA
gtaacggcagacttctccacgttttagagctagaaatagcaagttaaaataaggctagtccgttatcaacttgaaaaagtggcaccgagtcggtgctggtgcatctgactcctgaggagaagtctg

SEQ ID NO: 20519 - DNA, 125 bp, synthetic construct
  source 1..125: mol_type = other DNA
gtaacggcagacttctccacgttttagagctagaaatagcaagttaaaataaggctagtccgttatcaacttgaaaaagtggcaccgagtcggtgctggtgcatctgactcctgaggagaagtct

SEQ ID NO: 20520 - DNA, 124 bp, synthetic construct
  source 1..124: mol_type = other DNA
gtaacggcagacttctccacgttttagagctagaaatagcaagttaaaataaggctagtccgttatcaacttgaaaaagtggcaccgagtcggtgctggtgcatctgactcctgaggagaagtc

SEQ ID NO: 20521 - DNA, 132 bp, synthetic construct
  source 1..132: mol_type = other DNA
gtaacggcagacttctccacgttttagagctagaaatagcaagttaaaataaggctagtccgttatcaacttgaaaaagtggcaccgagtcggtgcggtgcatctgactcctgaggagaagtctgccgttac

SEQ ID NO: 20522 - DNA, 131 bp, synthetic construct
  source 1..131: mol_type = other DNA
gtaacggcagacttctccacgttttagagctagaaatagcaagttaaaataaggctagtccgttatcaacttgaaaaagtggcaccgagtcggtgcggtgcatctgactcctgaggagaagtctgccgtta

SEQ ID NO: 20523 - DNA, 130 bp, synthetic construct
  source 1..130: mol_type = other DNA
gtaacggcagacttctccacgttttagagctagaaatagcaagttaaaataaggctagtccgttatcaacttgaaaaagtggcaccgagtcggtgcggtgcatctgactcctgaggagaagtctgccgtt

SEQ ID NO: 20524 - DNA, 129 bp, synthetic construct
  source 1..129: mol_type = other DNA
gtaacggcagacttctccacgttttagagctagaaatagcaagttaaaataaggctagtccgttatcaacttgaaaaagtggcaccgagtcggtgcggtgcatctgactcctgaggagaagtctgccgt

SEQ ID NO: 20525 - DNA, 128 bp, synthetic construct
  source 1..128: mol_type = other DNA
gtaacggcagacttctccacgttttagagctagaaatagcaagttaaaataaggctagtccgttatcaacttgaaaaagtggcaccgagtcggtgcggtgcatctgactcctgaggagaagtctgccg

SEQ ID NO: 20526 - DNA, 127 bp, synthetic construct
  source 1..127: mol_type = other DNA
gtaacggcagacttctccacgttttagagctagaaatagcaagttaaaataaggctagtccgttatcaacttgaaaaagtggcaccgagtcggtgcggtgcatctgactcctgaggagaagtctgcc

SEQ ID NO: 20527 - DNA, 126 bp, synthetic construct
  source 1..126: mol_type = other DNA
gtaacggcagacttctccacgttttagagctagaaatagcaagttaaaataaggctagtccgttatcaacttgaaaaagtggcaccgagtcggtgcggtgcatctgactcctgaggagaagtctgc

SEQ ID NO: 20528 - DNA, 125 bp, synthetic construct
  source 1..125: mol_type = other DNA
gtaacggcagacttctccacgttttagagctagaaatagcaagttaaaataaggctagtccgttatcaacttgaaaaagtggcaccgagtcggtgcggtgcatctgactcctgaggagaagtctg

SEQ ID NO: 20529 - DNA, 124 bp, synthetic construct
  source 1..124: mol_type = other DNA
gtaacggcagacttctccacgttttagagctagaaatagcaagttaaaataaggctagtccgttatcaacttgaaaaagtggcaccgagtcggtgcggtgcatctgactcctgaggagaagtct

SEQ ID NO: 20530 - DNA, 123 bp, synthetic construct
  source 1..123: mol_type = other DNA
gtaacggcagacttctccacgttttagagctagaaatagcaagttaaaataaggctagtccgttatcaacttgaaaaagtggcaccgagtcggtgcggtgcatctgactcctgaggagaagtc

SEQ ID NO: 20531 - DNA, 131 bp, synthetic construct
  source 1..131: mol_type = other DNA
gtaacggcagacttctccacgttttagagctagaaatagcaagttaaaataaggctagtccgttatcaacttgaaaaagtggcaccgagtcggtgcgtgcatctgactcctgaggagaagtctgccgttac

SEQ ID NO: 20532 - DNA, 130 bp, synthetic construct
  source 1..130: mol_type = other DNA
gtaacggcagacttctccacgttttagagctagaaatagcaagttaaaataaggctagtccgttatcaacttgaaaaagtggcaccgagtcggtgcgtgcatctgactcctgaggagaagtctgccgtta

SEQ ID NO: 20533 - DNA, 129 bp, synthetic construct
  source 1..129: mol_type = other DNA
gtaacggcagacttctccacgttttagagctagaaatagcaagttaaaataaggctagtccgttatcaacttgaaaaagtggcaccgagtcggtgcgtgcatctgactcctgaggagaagtctgccgtt

SEQ ID NO: 20534 - DNA, 128 bp, synthetic construct
  source 1..128: mol_type = other DNA
gtaacggcagacttctccacgttttagagctagaaatagcaagttaaaataaggctagtccgttatcaacttgaaaaagtggcaccgagtcggtgcgtgcatctgactcctgaggagaagtctgccgt

SEQ ID NO: 20535 - DNA, 127 bp, synthetic construct
  source 1..127: mol_type = other DNA
gtaacggcagacttctccacgttttagagctagaaatagcaagttaaaataaggctagtccgttatcaacttgaaaaagtggcaccgagtcggtgcgtgcatctgactcctgaggagaagtctgccg

SEQ ID NO: 20536 - DNA, 126 bp, synthetic construct
  source 1..126: mol_type = other DNA
gtaacggcagacttctccacgttttagagctagaaatagcaagttaaaataaggctagtccgttatcaacttgaaaaagtggcaccgagtcggtgcgtgcatctgactcctgaggagaagtctgcc

SEQ ID NO: 20537 - DNA, 125 bp, synthetic construct
  source 1..125: mol_type = other DNA
gtaacggcagacttctccacgttttagagctagaaatagcaagttaaaataaggctagtccgttatcaacttgaaaaagtggcaccgagtcggtgcgtgcatctgactcctgaggagaagtctgc

SEQ ID NO: 20538 - DNA, 124 bp, synthetic construct
  source 1..124: mol_type = other DNA
gtaacggcagacttctccacgttttagagctagaaatagcaagttaaaataaggctagtccgttatcaacttgaaaaagtggcaccgagtcggtgcgtgcatctgactcctgaggagaagtctg

SEQ ID NO: 20539 - DNA, 123 bp, synthetic construct
  source 1..123: mol_type = other DNA
gtaacggcagacttctccacgttttagagctagaaatagcaagttaaaataaggctagtccgttatcaacttgaaaaagtggcaccgagtcggtgcgtgcatctgactcctgaggagaagtct

SEQ ID NO: 20540 - DNA, 122 bp, synthetic construct
  source 1..122: mol_type = other DNA
gtaacggcagacttctccacgttttagagctagaaatagcaagttaaaataaggctagtccgttatcaacttgaaaaagtggcaccgagtcggtgcgtgcatctgactcctgaggagaagtc

SEQ ID NO: 20541 - DNA, 130 bp, synthetic construct
  source 1..130: mol_type = other DNA
gtaacggcagacttctccacgttttagagctagaaatagcaagttaaaataaggctagtccgttatcaacttgaaaaagtggcaccgagtcggtgctgcatctgactcctgaggagaagtctgccgttac

SEQ ID NO: 20542 - DNA, 129 bp, synthetic construct
  source 1..129: mol_type = other DNA
gtaacggcagacttctccacgttttagagctagaaatagcaagttaaaataaggctagtccgttatcaacttgaaaaagtggcaccgagtcggtgctgcatctgactcctgaggagaagtctgccgtta

SEQ ID NO: 20543 - DNA, 128 bp, synthetic construct
  source 1..128: mol_type = other DNA
gtaacggcagacttctccacgttttagagctagaaatagcaagttaaaataaggctagtccgttatcaacttgaaaaagtggcaccgagtcggtgctgcatctgactcctgaggagaagtctgccgtt

SEQ ID NO: 20544 - DNA, 127 bp, synthetic construct
  source 1..127: mol_type = other DNA
gtaacggcagacttctccacgttttagagctagaaatagcaagttaaaataaggctagtccgttatcaacttgaaaaagtggcaccgagtcggtgctgcatctgactcctgaggagaagtctgccgt

SEQ ID NO: 20545 - DNA, 126 bp, synthetic construct
  source 1..126: mol_type = other DNA
gtaacggcagacttctccacgttttagagctagaaatagcaagttaaaataaggctagtccgttatcaacttgaaaaagtggcaccgagtcggtgctgcatctgactcctgaggagaagtctgccg

SEQ ID NO: 20546 - DNA, 125 bp, synthetic construct
  source 1..125: mol_type = other DNA
gtaacggcagacttctccacgttttagagctagaaatagcaagttaaaataaggctagtccgttatcaacttgaaaaagtggcaccgagtcggtgctgcatctgactcctgaggagaagtctgcc

SEQ ID NO: 20547 - DNA, 124 bp, synthetic construct
  source 1..124: mol_type = other DNA
gtaacggcagacttctccacgttttagagctagaaatagcaagttaaaataaggctagtccgttatcaacttgaaaaagtggcaccgagtcggtgctgcatctgactcctgaggagaagtctgc

SEQ ID NO: 20548 - DNA, 123 bp, synthetic construct
  source 1..123: mol_type = other DNA
gtaacggcagacttctccacgttttagagctagaaatagcaagttaaaataaggctagtccgttatcaacttgaaaaagtggcaccgagtcggtgctgcatctgactcctgaggagaagtctg

SEQ ID NO: 20549 - DNA, 122 bp, synthetic construct
  source 1..122: mol_type = other DNA
gtaacggcagacttctccacgttttagagctagaaatagcaagttaaaataaggctagtccgttatcaacttgaaaaagtggcaccgagtcggtgctgcatctgactcctgaggagaagtct

SEQ ID NO: 20550 - DNA, 121 bp, synthetic construct
  source 1..121: mol_type = other DNA
gtaacggcagacttctccacgttttagagctagaaatagcaagttaaaataaggctagtccgttatcaacttgaaaaagtggcaccgagtcggtgctgcatctgactcctgaggagaagtc

SEQ ID NO: 20551 - DNA, 129 bp, synthetic construct
  source 1..129: mol_type = other DNA
gtaacggcagacttctccacgttttagagctagaaatagcaagttaaaataaggctagtccgttatcaacttgaaaaagtggcaccgagtcggtgcgcatctgactcctgaggagaagtctgccgttac

SEQ ID NO: 20552 - DNA, 128 bp, synthetic construct
  source 1..128: mol_type = other DNA
gtaacggcagacttctccacgttttagagctagaaatagcaagttaaaataaggctagtccgttatcaacttgaaaaagtggcaccgagtcggtgcgcatctgactcctgaggagaagtctgccgtta

SEQ ID NO: 20553 - DNA, 127 bp, synthetic construct
  source 1..127: mol_type = other DNA
gtaacggcagacttctccacgttttagagctagaaatagcaagttaaaataaggctagtccgttatcaacttgaaaaagtggcaccgagtcggtgcgcatctgactcctgaggagaagtctgccgtt

SEQ ID NO: 20554 - DNA, 126 bp, synthetic construct
  source 1..126: mol_type = other DNA
gtaacggcagacttctccacgttttagagctagaaatagcaagttaaaataaggctagtccgttatcaacttgaaaaagtggcaccgagtcggtgcgcatctgactcctgaggagaagtctgccgt

SEQ ID NO: 20555 - DNA, 125 bp, synthetic construct
  source 1..125: mol_type = other DNA
gtaacggcagacttctccacgttttagagctagaaatagcaagttaaaataaggctagtccgttatcaacttgaaaaagtggcaccgagtcggtgcgcatctgactcctgaggagaagtctgccg

SEQ ID NO: 20556 - DNA, 124 bp, synthetic construct
  source 1..124: mol_type = other DNA
gtaacggcagacttctccacgttttagagctagaaatagcaagttaaaataaggctagtccgttatcaacttgaaaaagtggcaccgagtcggtgcgcatctgactcctgaggagaagtctgcc

SEQ ID NO: 20557 - DNA, 123 bp, synthetic construct
  source 1..123: mol_type = other DNA
gtaacggcagacttctccacgttttagagctagaaatagcaagttaaaataaggctagtccgttatcaacttgaaaaagtggcaccgagtcggtgcgcatctgactcctgaggagaagtctgc

SEQ ID NO: 20558 - DNA, 122 bp, synthetic construct
  source 1..122: mol_type = other DNA
gtaacggcagacttctccacgttttagagctagaaatagcaagttaaaataaggctagtccgttatcaacttgaaaaagtggcaccgagtcggtgcgcatctgactcctgaggagaagtctg

SEQ ID NO: 20559 - DNA, 121 bp, synthetic construct
  source 1..121: mol_type = other DNA
gtaacggcagacttctccacgttttagagctagaaatagcaagttaaaataaggctagtccgttatcaacttgaaaaagtggcaccgagtcggtgcgcatctgactcctgaggagaagtct

SEQ ID NO: 20560 - DNA, 120 bp, synthetic construct
  source 1..120: mol_type = other DNA
gtaacggcagacttctccacgttttagagctagaaatagcaagttaaaataaggctagtccgttatcaacttgaaaaagtggcaccgagtcggtgcgcatctgactcctgaggagaagtc

SEQ ID NO: 20561 - DNA, 127 bp, synthetic construct
  source 1..127: mol_type = other DNA
gtaacggcagacttctccacgttttagagctagaaatagcaagttaaaataaggctagtccgttatcaacttgaaaaagtggcaccgagtcggtgcatctgactcctgaggagaagtctgccgttac

SEQ ID NO: 20562 - DNA, 126 bp, synthetic construct
  source 1..126: mol_type = other DNA
gtaacggcagacttctccacgttttagagctagaaatagcaagttaaaataaggctagtccgttatcaacttgaaaaagtggcaccgagtcggtgcatctgactcctgaggagaagtctgccgtta

SEQ ID NO: 20563 - DNA, 125 bp, synthetic construct
  source 1..125: mol_type = other DNA
gtaacggcagacttctccacgttttagagctagaaatagcaagttaaaataaggctagtccgttatcaacttgaaaaagtggcaccgagtcggtgcatctgactcctgaggagaagtctgccgtt

SEQ ID NO: 20564 - DNA, 124 bp, synthetic construct
  source 1..124: mol_type = other DNA
gtaacggcagacttctccacgttttagagctagaaatagcaagttaaaataaggctagtccgttatcaacttgaaaaagtggcaccgagtcggtgcatctgactcctgaggagaagtctgccgt

SEQ ID NO: 20565 - DNA, 123 bp, synthetic construct
  source 1..123: mol_type = other DNA
gtaacggcagacttctccacgttttagagctagaaatagcaagttaaaataaggctagtccgttatcaacttgaaaaagtggcaccgagtcggtgcatctgactcctgaggagaagtctgccg

SEQ ID NO: 20566 - DNA, 122 bp, synthetic construct
  source 1..122: mol_type = other DNA
gtaacggcagacttctccacgttttagagctagaaatagcaagttaaaataaggctagtccgttatcaacttgaaaaagtggcaccgagtcggtgcatctgactcctgaggagaagtctgcc

SEQ ID NO: 20567 - DNA, 121 bp, synthetic construct
  source 1..121: mol_type = other DNA
gtaacggcagacttctccacgttttagagctagaaatagcaagttaaaataaggctagtccgttatcaacttgaaaaagtggcaccgagtcggtgcatctgactcctgaggagaagtctgc

SEQ ID NO: 20568 - DNA, 120 bp, synthetic construct
  source 1..120: mol_type = other DNA
gtaacggcagacttctccacgttttagagctagaaatagcaagttaaaataaggctagtccgttatcaacttgaaaaagtggcaccgagtcggtgcatctgactcctgaggagaagtctg

SEQ ID NO: 20569 - DNA, 119 bp, synthetic construct
  source 1..119: mol_type = other DNA
gtaacggcagacttctccacgttttagagctagaaatagcaagttaaaataaggctagtccgttatcaacttgaaaaagtggcaccgagtcggtgcatctgactcctgaggagaagtct

SEQ ID NO: 20570 - DNA, 118 bp, synthetic construct
  source 1..118: mol_type = other DNA
gtaacggcagacttctccacgttttagagctagaaatagcaagttaaaataaggctagtccgttatcaacttgaaaaagtggcaccgagtcggtgcatctgactcctgaggagaagtc

SEQ ID NO: 20571 - DNA, 124 bp, synthetic construct; identical to SEQ ID NO: 20391
  source 1..124: mol_type = other DNA

SEQ ID NO: 20572 - DNA, 123 bp, synthetic construct; identical to SEQ ID NO: 20392
  source 1..123: mol_type = other DNA

SEQ ID NO: 20573 - DNA, 122 bp, synthetic construct; identical to SEQ ID NO: 20393
  source 1..122: mol_type = other DNA

SEQ ID NO: 20574 - DNA, 121 bp, synthetic construct; identical to SEQ ID NO: 20394
  source 1..121: mol_type = other DNA

SEQ ID NO: 20575 - DNA, 120 bp, synthetic construct; identical to SEQ ID NO: 20395
  source 1..120: mol_type = other DNA

SEQ ID NO: 20576 - DNA, 119 bp, synthetic construct; identical to SEQ ID NO: 20396
  source 1..119: mol_type = other DNA

SEQ ID NO: 20577 - DNA, 118 bp, synthetic construct; identical to SEQ ID NO: 20397
  source 1..118: mol_type = other DNA

SEQ ID NO: 20578 - DNA, 117 bp, synthetic construct; identical to SEQ ID NO: 20398
  source 1..117: mol_type = other DNA

SEQ ID NO: 20579 - DNA, 116 bp, synthetic construct; identical to SEQ ID NO: 20399
  source 1..116: mol_type = other DNA

SEQ ID NO: 20580 - DNA, 115 bp, synthetic construct; identical to SEQ ID NO: 20400
  source 1..115: mol_type = other DNA

SEQ ID NO: 20581 - DNA, 123 bp, synthetic construct; identical to SEQ ID NO: 20401
  source 1..123: mol_type = other DNA

SEQ ID NO: 20582 - DNA, 122 bp, synthetic construct; identical to SEQ ID NO: 20402
  source 1..122: mol_type = other DNA

SEQ ID NO: 20583 - DNA, 121 bp, synthetic construct; identical to SEQ ID NO: 20403
  source 1..121: mol_type = other DNA

SEQ ID NO: 20584 - DNA, 120 bp, synthetic construct; identical to SEQ ID NO: 20404
  source 1..120: mol_type = other DNA

SEQ ID NO: 20585 - DNA, 119 bp, synthetic construct; identical to SEQ ID NO: 20405
  source 1..119: mol_type = other DNA

SEQ ID NO: 20586 - DNA, 118 bp, synthetic construct; identical to SEQ ID NO: 20406
  source 1..118: mol_type = other DNA

SEQ ID NO: 20587 - DNA, 117 bp, synthetic construct; identical to SEQ ID NO: 20407
  source 1..117: mol_type = other DNA

SEQ ID NO: 20588 - DNA, 116 bp, synthetic construct; identical to SEQ ID NO: 20408
  source 1..116: mol_type = other DNA

SEQ ID NO: 20589 - DNA, 115 bp, synthetic construct; identical to SEQ ID NO: 20409
  source 1..115: mol_type = other DNA

SEQ ID NO: 20590 - DNA, 114 bp, synthetic construct; identical to SEQ ID NO: 20410
  source 1..114: mol_type = other DNA

SEQ ID NO: 20591 - DNA, 122 bp, synthetic construct; identical to SEQ ID NO: 20411
  source 1..122: mol_type = other DNA

SEQ ID NO: 20592 - DNA, 121 bp, synthetic construct; identical to SEQ ID NO: 20412
  source 1..121: mol_type = other DNA

SEQ ID NO: 20593 - DNA, 120 bp, synthetic construct; identical to SEQ ID NO: 20413
  source 1..120: mol_type = other DNA

SEQ ID NO: 20594 - DNA, 119 bp, synthetic construct; identical to SEQ ID NO: 20414
  source 1..119: mol_type = other DNA

SEQ ID NO: 20595 - DNA, 118 bp, synthetic construct; identical to SEQ ID NO: 20415
  source 1..118: mol_type = other DNA

SEQ ID NO: 20596 - DNA, 117 bp, synthetic construct; identical to SEQ ID NO: 20416
  source 1..117: mol_type = other DNA

SEQ ID NO: 20597 - DNA, 116 bp, synthetic construct; identical to SEQ ID NO: 20417
  source 1..116: mol_type = other DNA

SEQ ID NO: 20598 - DNA, 115 bp, synthetic construct; identical to SEQ ID NO: 20418
  source 1..115: mol_type = other DNA

SEQ ID NO: 20599 - DNA, 114 bp, synthetic construct; identical to SEQ ID NO: 20419
  source 1..114: mol_type = other DNA

SEQ ID NO: 20600 - DNA, 113 bp, synthetic construct; identical to SEQ ID NO: 20420
  source 1..113: mol_type = other DNA

SEQ ID NO: 20601 - DNA, 6351 bp, synthetic construct
  source 1..6351: mol_type = other DNA
atgaaacggacagccgacggaagcgagttcgagtcaccaaagaagaagcggaaagtcgacaagaagtacagcatcggcctggacatcggcaccaactctgtgggctgggccgtgatcaccgacgagtacaaggtgcccagcaagaaattcaaggtgctgggcaacaccgaccggcacagcatcaagaagaacctgatcggagccctgctgttcgacagcggcgaaacagccgaggccacccggctgaagagaaccgccagaagaagatacaccagacggaagaaccggatctgctatctgcaagagatcttcagcaacgagatggccaaggtggacgacagcttcttccacagactggaagagtccttcctggtggaagaggataagaagcacgagcggcaccccatcttcggcaacatcgtggacgaggtggcctaccacgagaagtaccccaccatctaccacctgagaaagaaactggtggacagcaccgacaaggccgacctgcggctgatctatctggccctggcccacatgatcaagttccggggccacttcctgatcgagggcgacctgaaccccgacaacagcgacgtggacaagctgttcatccagctggtgcagacctacaaccagctgttcgaggaaaaccccatcaacgccagcggcgtggacgccaaggccatcctgtctgccagactgagcaagagcagacggctggaaaatctgatcgcccagctgcccggcgagaagaagaatggcctgttcggaaacctgattgccctgagcctgggcctgacccccaacttcaagagcaacttcgacctggccgaggatgccaaactgcagctgagcaaggacacctacgacgacgacctggacaacctgctggcccagatcggcgaccagtacgccgacctgtttctggccgccaagaacctgtccgacgccatcctgctgagcgacatcctgagagtgaacaccgagatcaccaaggcccccctgagcgcctctatgatcaagagatacgacgagcaccaccaggacctgaccctgctgaaagctctcgtgcggcagcagctgcctgagaagtacaaagagattttcttcgaccagagcaagaacggctacgccggctacattgacggcggagccagccaggaagagttctacaagttcatcaagcccatcctggaaaagatggacggcaccgaggaactgctcgtgaagctgaacagagaggacctgctgcggaagcagcggaccttcgacaacggcagcatcccccaccagatccacctgggagagctgcacgccattctgcggcggcaggaagatttttacccattcctgaaggacaaccgggaaaagatcgagaagatcctgaccttccgcatcccctactacgtgggccctctggccaggggaaacagcagattcgcctggatgaccagaaagagcgaggaaaccatcaccccctggaacttcgaggaagtggtggacaagggcgcttccgcccagagcttcatcgagcggatgaccaacttcgataagaacctgcccaacgagaaggtgctgcccaagcacagcctgctgtacgagtacttcaccgtgtataacgagctgaccaaagtgaaatacgtgaccgagggaatgagaaagcccgccttcctgagcggcgagcagaaaaaggccatcgtggacctgctgttcaagaccaaccggaaagtgaccgtgaagcagctgaaagaggactacttcaagaaaatcgagtgcttcgactccgtggaaatctccggcgtggaagatcggttcaacgcctccctgggcacataccacgatctgctgaaaattatcaaggacaaggacttcctggacaatgaggaaaacgaggacattctggaagatatcgtgctgaccctgacactgtttgaggacagagagatgatcgaggaacggctgaaaacctatgcccacctgttcgacgacaaagtgatgaagcagctgaagcggcggagatacaccggctggggcaggctgagccggaagctgatcaacggcatccgggacaagcagtccggcaagacaatcctggatttcctgaagtccgacggcttcgccaacagaaacttcatgcagctgatccacgacgacagcctgacctttaaagaggacatccagaaagcccaggtgtccggccagggcgatagcctgcacgagcacattgccaatctggccggcagccccgccattaagaagggcatcctgcagacagtgaaggtggtggacgagctcgtgaaagtgatgggccggcacaagcccgagaacatcgtgatcgaaatggccagagagaaccagaccacccagaagggacagaagaacagccgcgagagaatgaagcggatcgaagagggcatcaaagagctgggcagccagatcctgaaagaacaccccgtggaaaacacccagctgcagaacgagaagctgtacctgtactacctgcagaatgggcgggatatgtacgtggaccaggaactggacatcaaccggctgtccgactacgatgtggaccatatcgtgcctcagagctttctgaaggacgactccatcgacaacaaggtgctgaccagaagcgacaaggcccggggcaagagcgacaacgtgccctccgaagaggtcgtgaagaagatgaagaactactggcggcagctgctgaacgccaagctgattacccagagaaagttcgacaatctgaccaaggccgagagaggcggcctgagcgaactggataaggccggcttcatcaagagacagctggtggaaacccggcagatcacaaagcacgtggcacagatcctggactcccggatgaacactaagtacgacgagaatgacaagctgatccgggaagtgaaagtgatcaccctgaagtccaagctggtgtccgatttccggaaggatttccagttttacaaagtgcgcgagatcaacaactaccaccacgcccacgacgcctacctgaacgccgtcgtgggaaccgccctgatcaaaaagtaccctaagctggaaagcgagttcgtgtacggcgactacaaggtgtacgacgtgcggaagatgatcgccaagagcgagcaggaaatcggcaaggctaccgccaagtacttcttctacagcaacatcatgaactttttcaagaccgagattaccctggccaacggcgagatccggaagcggcctctgatcgagacaaacggcgaaaccggggagatcgtgtgggataagggccgggattttgccaccgtgcggaaagtgctgagcatgccccaagtgaatatcgtgaaaaagaccgaggtgcagacaggcggcttcagcaaagagtctatcctgcccaagaggaacagcgataagctgatcgccagaaagaaggactgggaccctaagaagtacggcggcttcgacagccccaccgtggcctattctgtgctggtggtggccaaagtggaaaagggcaagtccaagaaactgaagagtgtgaaagagctgctggggatcaccatcatggaaagaagcagcttcgagaagaatcccatcgactttctggaagccaagggctacaaagaagtgaaaaaggacctgatcatcaagctgcctaagtactccctgttcgagctggaaaacggccggaagagaatgctggcctctgccggcgaactgcagaagggaaacgaactggccctgccctccaaatatgtgaacttcctgtacctggccagccactatgagaagctgaagggctcccccgaggataatgagcagaaacagctgtttgtggaacagcacaagcactacctggacgagatcatcgagcagatcagcgagttctccaagagagtgatcctggccgacgctaatctggacaaagtgctgtccgcctacaacaagcaccgggataagcccatcagagagcaggccgagaatatcatccacctgtttaccctgaccaatctgggagcccctgccgccttcaagtactttgacaccaccatcgaccggaagaggtacaccagcaccaaagaggtgctggacgccaccctgatccaccagagcatcaccggcctgtacgagacacggatcgacctgtctcagctgggaggtgactctggaggatctagcggaggatcctctggcagcgagacaccaggaacaagcgagtcagcaacaccagagagcagtggcggcagcagcggcggcagcagcaccctaaatatagaagatgagtatcggctacatgagacctcaaaagagccagatgtttctctagggtccacatggctgtctgattttcctcaggcctgggcggaaaccgggggcatgggactggcagttcgccaagctcctctgatcatacctctgaaagcaacctctacccccgtgtccataaaacaataccccatgtcacaagaagccagactggggatcaagccccacatacagagactgttggaccagggaatactggtaccctgccagtccccctggaacacgcccctgctacccgttaagaaaccagggactaatgattataggcctgtccaggatctgagagaagtcaacaagcgggtggaagacatccaccccaccgtgcccaacccttacaacctcttgagcgggctcccaccgtcccaccagtggtacactgtgcttgatttaaaggatgcctttttctgcctgagactccaccccaccagtcagcctctcttcgcctttgagtggagagatccagagatgggaatctcaggacaattgacctggaccagactcccacagggtttcaaaaacagtcccaccctgtttaatgaggcactgcacagagacctagcagacttccggatccagcacccagacttgatcctgctacagtacgtggatgacttactgctggccgccacttctgagctagactgccaacaaggtactcgggccctgttacaaaccctagggaacctcgggtatcgggcctcggccaagaaagcccaaatttgccagaaacaggtcaagtatctggggtatcttctaaaagagggtcagagatggctgactgaggccagaaaagagactgtgatggggcagcctactccgaagacccctcgacaactaagggagttcctagggaaggcaggcttctgtcgcctcttcatccctgggtttgcagaaatggcagcccccctgtaccctctcaccaaaccggggactctgtttaattggggcccagaccaacaaaaggcctatcaagaaatcaagcaagctcttctaactgccccagccctggggttgccagatttgactaagccctttgaactctttgtcgacgagaagcagggctacgccaaaggtgtcctaacgcaaaaactgggaccttggcgtcggccggtggcctacctgtccaaaaagctagacccagtagcagctgggtggcccccttgcctacggatggtagcagccattgccgtactgacaaaggatgcaggcaagctaaccatgggacagccactagtcattctggccccccatgcagtagaggcactagtcaaacaaccccccgaccgctggctttccaacgcccggatgactcactatcaggccttgcttttggacacggaccgggtccagttcggaccggtggtagccctgaacccggctacgctgctcccactgcctgaggaagggctgcaacacaactgccttgatatcctggccgaagcccacggaacccgacccgacctaacggaccagccgctcccagacgccgaccacacctggtacacggatggaagcagtctcttacaagagggacagcgtaaggcgggagctgcggtgaccaccgagaccgaggtaatctgggctaaagccctgccagccgggacatccgctcagcgggctgaactgatagcactcacccaggccctaaagatggcagaaggtaagaagctaaatgtttatactgatagccgttatgcttttgctactgcccatatccatggagaaatatacagaaggcgtgggtggctcacatcagaaggcaaagagatcaaaaataaagacgagatcttggccctactaaaagccctctttctgcccaaaagacttagcataatccattgtccaggacatcaaaagggacacagcgccgaggctagaggcaaccggatggctgaccaagcggcccgaaaggcagccatcacagagactccagacacctctaccctcctcatagaaaattcatcaccctctggcggctcaaaaagaaccgccgacggcagcgaattcgagcccaagaagaagaggaaagtc

SEQ ID NO: 20602 - protein, 2117 aa, synthetic construct
MKRTADGSEFESPKKKRKVDKKYSIGLDIGTNSVGWAVITDEYKVPSKKFKVLGNTDRHSIKKNLIGALLFDSGETAEATRLKRTARRRYTRRKNRICYLQEIFSNEMAKVDDSFFHRLEESFLVEEDKKHERHPIFGNIVDEVAYHEKYPTIYHLRKKLVDSTDKADLRLIYLALAHMIKFRGHFLIEGDLNPDNSDVDKLFIQLVQTYNQLFEENPINASGVDAKAILSARLSKSRRLENLIAQLPGEKKNGLFGNLIALSLGLTPNFKSNFDLAEDAKLQLSKDTYDDDLDNLLAQIGDQYADLFLAAKNLSDAILLSDILRVNTEITKAPLSASMIKRYDEHHQDLTLLKALVRQQLPEKYKEIFFDQSKNGYAGYIDGGASQEEFYKFIKPILEKMDGTEELLVKLNREDLLRKQRTFDNGSIPHQIHLGELHAILRRQEDFYPFLKDNREKIEKILTFRIPYYVGPLARGNSRFAWMTRKSEETITPWNFEEVVDKGASAQSFIERMTNFDKNLPNEKVLPKHSLLYEYFTVYNELTKVKYVTEGMRKPAFLSGEQKKAIVDLLFKTNRKVTVKQLKEDYFKKIECFDSVEISGVEDRFNASLGTYHDLLKIIKDKDFLDNEENEDILEDIVLTLTLFEDREMIEERLKTYAHLFDDKVMKQLKRRRYTGWGRLSRKLINGIRDKQSGKTILDFLKSDGFANRNFMQLIHDDSLTFKEDIQKAQVSGQGDSLHEHIANLAGSPAIKKGILQTVKVVDELVKVMGRHKPENIVIEMARENQTTQKGQKNSRERMKRIEEGIKELGSQILKEHPVENTQLQNEKLYLYYLQNGRDMYVDQELDINRLSDYDVDHIVPQSFLKDDSIDNKVLTRSDKARGKSDNVPSEEVVKKMKNYWRQLLNAKLITQRKFDNLTKAERGGLSELDKAGFIKRQLVETRQITKHVAQILDSRMNTKYDENDKLIREVKVITLKSKLVSDFRKDFQFYKVREINNYHHAHDAYLNAVVGTALIKKYPKLESEFVYGDYKVYDVRKMIAKSEQEIGKATAKYFFYSNIMNFFKTEITLANGEIRKRPLIETNGETGEIVWDKGRDFATVRKVLSMPQVNIVKKTEVQTGGFSKESILPKRNSDKLIARKKDWDPKKYGGFDSPTVAYSVLVVAKVEKGKSKKLKSVKELLGITIMERSSFEKNPIDFLEAKGYKEVKKDLIIKLPKYSLFELENGRKRMLASAGELQKGNELALPSKYVNFLYLASHYEKLKGSPEDNEQKQLFVEQHKHYLDEIIEQISEFSKRVILADANLDKVLSAYNKHRDKPIREQAENIIHLFTLTNLGAPAAFKYFDTTIDRKRYTSTKEVLDATLIHQSITGLYETRIDLSQLGGDSGGSSGGSSGSETPGTSESATPESSGGSSGGSSTLNIEDEYRLHETSKEPDVSLGSTWLSDFPQAWAETGGMGLAVRQAPLIIPLKATSTPVSIKQYPMSQEARLGIKPHIQRLLDQGILVPCQSPWNTPLLPVKKPGTNDYRPVQDLREVNKRVEDIHPTVPNPYNLLSGLPPSHQWYTVLDLKDAFFCLRLHPTSQPLFAFEWRDPEMGISGQLTWTRLPQGFKNSPTLFNEALHRDLADFRIQHPDLILLQYVDDLLLAATSELDCQQGTRALLQTLGNLGYRASAKKAQICQKQVKYLGYLLKEGQRWLTEARKETVMGQPTPKTPRQLREFLGKAGFCRLFIPGFAEMAAPLYPLTKPGTLFNWGPDQQKAYQEIKQALLTAPALGLPDLTKPFELFVDEKQGYAKGVLTQKLGPWRRPVAYLSKKLDPVAAGWPPCLRMVAAIAVLTKDAGKLTMGQPLVILAPHAVEALVKQPPDRWLSNARMTHYQALLLDTDRVQFGPVVALNPATLLPLPEEGLQHNCLDILAEAHGTRPDLTDQPLPDADHTWYTDGSSLLQEGQRKAGAAVTTETEVIWAKALPAGTSAQRAELIALTQALKMAEGKKLNVYTDSRYAFATAHIHGEIYRRRGWLTSEGKEIKNKDEILALLKALFLPKRLSIIHCPGHQKGHSAEARGNRMADQAARKAAITETPDTSTLLIENSSPSGGSKRTADGSEFEPKKKRKV

SEQ ID NO: 20603 - RNA, 118 nt, synthetic construct
  source 1..118: mol_type = other RNA
catggtgcacctgactcctggttttagagctagaaatagcaagttaaaataaggctagtccgttatcaacttgaaaaagtggcaccgagtcggtgcgacttctctgcaggagtcaggt

SEQ ID NO: 20604 - RNA, 119 nt, synthetic construct
  source 1..119: mol_type = other RNA
catggtgcacctgactcctggttttagagctagaaatagcaagttaaaataaggctagtccgttatcaacttgaaaaagtggcaccgagtcggtgcgacttctctgcaggagtcaggtg

SEQ ID NO: 20605 - RNA, 122 nt, synthetic construct
  source 1..122: mol_type = other RNA
catggtgcacctgactcctggttttagagctagaaatagcaagttaaaataaggctagtccgttatcaacttgaaaaagtggcaccgagtcggtgcgacttctctgcaggagtcaggtgcac

SEQ ID NO: 20606 - RNA, 120 nt, synthetic construct
  source 1..120: mol_type = other RNA
catggtgcacctgactcctggttttagagctagaaatagcaagttaaaataaggctagtccgttatcaacttgaaaaagtggcaccgagtcggtgcagacttctctgcaggagtcaggtg

SEQ ID NO: 20607 - RNA, 121 nt, synthetic construct
  source 1..121: mol_type = other RNA
catggtgcacctgactcctggttttagagctagaaatagcaagttaaaataaggctagtccgttatcaacttgaaaaagtggcaccgagtcggtgcagacttctctgcaggagtcaggtgc

SEQ ID NO: 20608 - RNA, 122 nt, synthetic construct
  source 1..122: mol_type = other RNA
catggtgcacctgactcctggttttagagctagaaatagcaagttaaaataaggctagtccgttatcaacttgaaaaagtggcaccgagtcggtgcagacttctctgcaggagtcaggtgca

SEQ ID NO: 20609 - RNA, 123 nt, synthetic construct
  source 1..123: mol_type = other RNA
catggtgcacctgactcctggttttagagctagaaatagcaagttaaaataaggctagtccgttatcaacttgaaaaagtggcaccgagtcggtgcagacttctctgcaggagtcaggtgcac

SEQ ID NO: 20610 - RNA, 124 nt, synthetic construct
  source 1..124: mol_type = other RNA
gcatggtgcacctgactcctggttttagagctagaaatagcaagttaaaataaggctagtccgttatcaacttgaaaaagtggcaccgagtcggtgcagacttctctgcaggagtcaggtgcac

SEQ ID NO: 20611 - RNA, 124 nt, synthetic construct
  source 1..124: mol_type = other RNA
catggtgcacctgactcctggttttagagctagaaatagcaagttaaaataaggctagtccgttatcaacttgaaaaagtggcaccgagtcggtgcggcagacttctctgcaggagtcaggtgc

SEQ ID NO: 20612 - RNA, 126 nt, synthetic construct
  source 1..126: mol_type = other RNA
catggtgcacctgactcctggttttagagctagaaatagcaagttaaaataaggctagtccgttatcaacttgaaaaagtggcaccgagtcggtgcggcagacttctctgcaggagtcaggtgcac

SEQ ID NO: 20613 - RNA, 100 nt, synthetic construct
  source 1..100: mol_type = other RNA
ccttgataccaacctgcccagttttagagctagaaatagcaagttaaaataaggctagtccgttatcaacttgaaaaagtggcaccgagtcggtgctttt

SEQ ID NO: 20614 - RNA, 120 nt, synthetic construct; identical to SEQ ID NO: 19748
  source 1..120: mol_type = other RNA

SEQ ID NO: 20615 - RNA, 100 nt, synthetic construct; identical to SEQ ID NO: 20613
  source 1..100: mol_type = other RNA

SEQ ID NO: 20616 - RNA, 122 nt, synthetic construct
  source 1..122: mol_type = other RNA
  modified_base 1: mod_base = OTHER; note = 2'-O-methyl guanosine phosphorothioate
  modified_base 2: mod_base = OTHER; note = 2'-O-methyl guanosine phosphorothioate
  modified_base 3: mod_base = OTHER; note = 2'-O-methyl adenosine phosphorothioate
  modified_base 29: mod_base = OTHER; note = 2'-O-methyl guanosine
  modified_base 30: mod_base = OTHER; note = 2'-O-methyl cytidine
  modified_base 31: mod_base = OTHER; note = 2'-O-methyl uridine
  modified_base 32: mod_base = OTHER; note = 2'-O-methyl adenosine
  modified_base 33: mod_base = OTHER; note = 2'-O-methyl guanosine
  modified_base 34: mod_base = OTHER; note = 2'-O-methyl adenosine
  modified_base 35: mod_base = OTHER; note = 2'-O-methyl adenosine
  modified_base 36: mod_base = OTHER; note = 2'-O-methyl adenosine
  modified_base 37: mod_base = OTHER; note = 2'-O-methyl uridine
  modified_base 38: mod_base = OTHER; note = 2'-O-methyl adenosine
  modified_base 39: mod_base = OTHER; note = 2'-O-methyl guanosine
  modified_base 40: mod_base = OTHER; note = 2'-O-methyl cytidine
  modified_base 69: mod_base = OTHER; note = 2'-O-methyl adenosine
  modified_base 70: mod_base = OTHER; note = 2'-O-methyl cytidine
  modified_base 71: mod_base = OTHER; note = 2'-O-methyl uridine
  modified_base 72: mod_base = OTHER; note = 2'-O-methyl uridine
  modified_base 73: mod_base = OTHER; note = 2'-O-methyl guanosine
  modified_base 74: mod_base = OTHER; note = 2'-O-methyl adenosine
  modified_base 75: mod_base = OTHER; note = 2'-O-methyl adenosine
  modified_base 76: mod_base = OTHER; note = 2'-O-methyl adenosine
  modified_base 77: mod_base = OTHER; note = 2'-O-methyl adenosine
  modified_base 78: mod_base = OTHER; note = 2'-O-methyl adenosine
  modified_base 79: mod_base = OTHER; note = 2'-O-methyl guanosine
  modified_base 80: mod_base = OTHER; note = 2'-O-methyl uridine
  modified_base 81: mod_base = OTHER; note = 2'-O-methyl guanosine
  modified_base 82: mod_base = OTHER; note = 2'-O-methyl guanosine
  modified_base 83: mod_base = OTHER; note = 2'-O-methyl cytidine
  modified_base 84: mod_base = OTHER; note = 2'-O-methyl adenosine
  modified_base 85: mod_base = OTHER; note = 2'-O-methyl cytidine
  modified_base 86: mod_base = OTHER; note = 2'-O-methyl cytidine
  modified_base 87: mod_base = OTHER; note = 2'-O-methyl guanosine
  modified_base 88: mod_base = OTHER; note = 2'-O-methyl adenosine
  modified_base 89: mod_base = OTHER; note = 2'-O-methyl guanosine
  modified_base 90: mod_base = OTHER; note = 2'-O-methyl uridine
  modified_base 91: mod_base = OTHER; note = 2'-O-methyl cytidine
  modified_base 92: mod_base = OTHER; note = 2'-O-methyl guanosine
  modified_base 93: mod_base = OTHER; note = 2'-O-methyl guanosine
  modified_base 94: mod_base = OTHER; note = 2'-O-methyl uridine
  modified_base 95: mod_base = OTHER; note = 2'-O-methyl guanosine
  modified_base 96: mod_base = OTHER; note = 2'-O-methyl cytidine
  modified_base 119: mod_base = OTHER; note = guanosine phosphorothioate
  modified_base 120: mod_base = OTHER; note = 2'-O-methyl guanosine phosphorothioate
  modified_base 121: mod_base = OTHER; note = 2'-O-methyl adenosine phosphorothioate
  modified_base 122: mod_base = OTHER; note = 2'-O-methyl cytidine
ggatggtcctcatgaacgacgttttagagctagaaatagcaagttaaaataaggctagtccgttatcaacttgaaaaagtggcaccgagtcggtgcttaccgctccagtcgttcatgaggac

SEQ ID NO: 20617 - RNA, 121 nt, synthetic construct
  source 1..121: mol_type = other RNA
  modified_base 1: mod_base = OTHER; note = 2'-O-methyl guanosine phosphorothioate
  modified_base 2: mod_base = OTHER; note = 2'-O-methyl guanosine phosphorothioate
  modified_base 3: mod_base = OTHER; note = 2'-O-methyl adenosine phosphorothioate
  modified_base 29: mod_base = OTHER; note = 2'-O-methyl guanosine
  modified_base 30: mod_base = OTHER; note = 2'-O-methyl cytidine
  modified_base 31: mod_base = OTHER; note = 2'-O-methyl uridine
  modified_base 32: mod_base = OTHER; note = 2'-O-methyl adenosine
  modified_base 33: mod_base = OTHER; note = 2'-O-methyl guanosine
  modified_base 34: mod_base = OTHER; note = 2'-O-methyl adenosine
  modified_base 35: mod_base = OTHER; note = 2'-O-methyl adenosine
  modified_base 36: mod_base = OTHER; note = 2'-O-methyl adenosine
  modified_base 37: mod_base = OTHER; note = 2'-O-methyl uridine
  modified_base 38: mod_base = OTHER; note = 2'-O-methyl adenosine
  modified_base 39: mod_base = OTHER; note = 2'-O-methyl guanosine
  modified_base 40: mod_base = OTHER; note = 2'-O-methyl cytidine
  modified_base 69: mod_base = OTHER; note = 2'-O-methyl adenosine
  modified_base 70: mod_base = OTHER; note = 2'-O-methyl cytidine
  modified_base 71: mod_base = OTHER; note = 2'-O-methyl uridine
  modified_base 72: mod_base = OTHER; note = 2'-O-methyl uridine
  modified_base 73: mod_base = OTHER; note = 2'-O-methyl guanosine
  modified_base 74: mod_base = OTHER; note = 2'-O-methyl adenosine
  modified_base 75: mod_base = OTHER; note = 2'-O-methyl adenosine
  modified_base 76: mod_base = OTHER; note = 2'-O-methyl adenosine
  modified_base 77: mod_base = OTHER; note = 2'-O-methyl adenosine
  modified_base 78: mod_base = OTHER; note = 2'-O-methyl adenosine
  modified_base 79: mod_base = OTHER; note = 2'-O-methyl guanosine
  modified_base 80: mod_base = OTHER; note = 2'-O-methyl uridine
  modified_base 81: mod_base = OTHER; note = 2'-O-methyl guanosine
  modified_base 82: mod_base = OTHER; note = 2'-O-methyl guanosine
  modified_base 83: mod_base = OTHER; note = 2'-O-methyl cytidine
  modified_base 84: mod_base = OTHER; note = 2'-O-methyl adenosine
  modified_base 85: mod_base = OTHER; note = 2'-O-methyl cytidine
  modified_base 86: mod_base = OTHER; note = 2'-O-methyl cytidine
  modified_base 87: mod_base = OTHER; note = 2'-O-methyl guanosine
  modified_base 88: mod_base = OTHER; note = 2'-O-methyl adenosine
  modified_base 89: mod_base = OTHER; note = 2'-O-methyl guanosine
  modified_base 90: mod_base = OTHER; note = 2'-O-methyl uridine
  modified_base 91: mod_base = OTHER; note = 2'-O-methyl cytidine
  modified_base 92: mod_base = OTHER; note = 2'-O-methyl guanosine
  modified_base 93: mod_base = OTHER; note = 2'-O-methyl guanosine
  modified_base 94: mod_base = OTHER; note = 2'-O-methyl uridine
  modified_base 95: mod_base = OTHER; note = 2'-O-methyl guanosine
  modified_base 96: mod_base = OTHER; note = 2'-O-methyl cytidine
  modified_base 118: mod_base = OTHER; note = guanosine phosphorothioate
  modified_base 119: mod_base = OTHER; note = 2'-O-methyl adenosine phosphorothioate
  modified_base 120: mod_base = OTHER; note = 2'-O-methyl guanosine phosphorothioate
  modified_base 121: mod_base = OTHER; note = 2'-O-methyl guanosine
ggatggtcctcatgaacgacgttttagagctagaaatagcaagttaaaataaggctagtccgttatcaacttgaaaaagtggcaccgagtcggtgcattaccgctccagtcgttcatgagg

SEQ ID NO: 20618 - RNA, 126 nt, synthetic construct
  source 1..126: mol_type = other RNA
  modified_base 1: mod_base = OTHER; note = 2'-O-methyl uridine phosphorothioate
  modified_base 2: mod_base = OTHER; note = 2'-O-methyl cytidine phosphorothioate
  modified_base 3: mod_base = OTHER; note = 2'-O-methyl adenosine phosphorothioate
  modified_base 29: mod_base = OTHER; note = 2'-O-methyl guanosine
  modified_base 30: mod_base = OTHER; note = 2'-O-methyl cytidine
  modified_base 31: mod_base = OTHER; note = 2'-O-methyl uridine
  modified_base 32: mod_base = OTHER; note = 2'-O-methyl adenosine
  modified_base 33: mod_base = OTHER; note = 2'-O-methyl guanosine
  modified_base 34: mod_base = OTHER; note = 2'-O-methyl adenosine
  modified_base 35: mod_base = OTHER; note = 2'-O-methyl adenosine
  modified_base 36: mod_base = OTHER; note = 2'-O-methyl adenosine
  modified_base 37: mod_base = OTHER; note = 2'-O-methyl uridine
  modified_base 38: mod_base = OTHER; note = 2'-O-methyl adenosine
  modified_base 39: mod_base = OTHER; note = 2'-O-methyl guanosine
  modified_base 40: mod_base = OTHER; note = 2'-O-methyl cytidine
  modified_base 69: mod_base = OTHER; note = 2'-O-methyl adenosine
  modified_base 70: mod_base = OTHER; note = 2'-O-methyl cytidine
  modified_base 71: mod_base = OTHER; note = 2'-O-methyl uridine
  modified_base 72: mod_base = OTHER; note = 2'-O-methyl uridine
  modified_base 73: mod_base = OTHER; note = 2'-O-methyl guanosine
  modified_base 74: mod_base = OTHER; note = 2'-O-methyl adenosine
  modified_base 75: mod_base = OTHER; note = 2'-O-methyl adenosine
  modified_base 76: mod_base = OTHER; note = 2'-O-methyl adenosine
  modified_base 77: mod_base = OTHER; note = 2'-O-methyl adenosine
  modified_base 78: mod_base = OTHER; note = 2'-O-methyl adenosine
  modified_base 79: mod_base = OTHER; note = 2'-O-methyl guanosine
  modified_base 80: mod_base = OTHER; note = 2'-O-methyl uridine
  modified_base 81: mod_base = OTHER; note = 2'-O-methyl guanosine
  modified_base 82: mod_base = OTHER; note = 2'-O-methyl guanosine
  modified_base 83: mod_base = OTHER; note = 2'-O-methyl cytidine
  modified_base 84: mod_base = OTHER; note = 2'-O-methyl adenosine
  modified_base 85: mod_base = OTHER; note = 2'-O-methyl cytidine
  modified_base 86: mod_base = OTHER; note = 2'-O-methyl cytidine
  modified_base 87: mod_base = OTHER; note = 2'-O-methyl guanosine
  modified_base 88: mod_base = OTHER; note = 2'-O-methyl adenosine
  modified_base 89: mod_base = OTHER; note = 2'-O-methyl guanosine
  modified_base 90: mod_base = OTHER; note = 2'-O-methyl uridine
  modified_base 91: mod_base = OTHER; note = 2'-O-methyl cytidine
  modified_base 92: mod_base = OTHER; note = 2'-O-methyl guanosine
  modified_base 93: mod_base = OTHER; note = 2'-O-methyl guanosine
  modified_base 94: mod_base = OTHER; note = 2'-O-methyl uridine
  modified_base 95: mod_base = OTHER; note = 2'-O-methyl guanosine
  modified_base 96: mod_base = OTHER; note = 2'-O-methyl cytidine
  modified_base 123: mod_base = OTHER; note = cytidine phosphorothioate
  modified_base 124: mod_base = OTHER; note = 2'-O-methyl uridine phosphorothioate
  modified_base 125: mod_base = OTHER; note = 2'-O-methyl uridine phosphorothioate
  modified_base 126: mod_base = OTHER; note = 2'-O-methyl cytidine
tcagaggaagctgggccaccgttttagagctagaaatagcaagttaaaataaggctagtccgttatcaacttgaaaaagtggcaccgagtcggtgctggagcggtaatggctggtggcccagcttc

SEQ ID NO: 20619 - RNA, 128 nt, synthetic construct
  source 1..128: mol_type = other RNA
  modified_base 1: mod_base = OTHER; note = 2'-O-methyl uridine phosphorothioate
  modified_base 2: mod_base = OTHER; note = 2'-O-methyl cytidine phosphorothioate
  modified_base 3: mod_base = OTHER; note = 2'-O-methyl adenosine phosphorothioate
  modified_base 29: mod_base = OTHER; note = 2'-O-methyl guanosine
  modified_base 30: mod_base = OTHER; note = 2'-O-methyl cytidine
  modified_base 31: mod_base = OTHER; note = 2'-O-methyl uridine
  modified_base 32: mod_base = OTHER; note = 2'-O-methyl adenosine
  modified_base 33: mod_base = OTHER; note = 2'-O-methyl guanosine
  modified_base 34: mod_base = OTHER; note = 2'-O-methyl adenosine
  modified_base 35: mod_base = OTHER; note = 2'-O-methyl adenosine
  modified_base 36: mod_base = OTHER; note = 2'-O-methyl adenosine
  modified_base 37: mod_base = OTHER; note = 2'-O-methyl uridine
  modified_base 38: mod_base = OTHER; note = 2'-O-methyl adenosine
  modified_base 39: mod_base = OTHER; note = 2'-O-methyl guanosine
  modified_base 40: mod_base = OTHER; note = 2'-O-methyl cytidine
  modified_base 69: mod_base = OTHER; note = 2'-O-methyl adenosine
  modified_base 70: mod_base = OTHER; note = 2'-O-methyl cytidine
  modified_base 71: mod_base = OTHER; note = 2'-O-methyl uridine
  modified_base 72: mod_base = OTHER; note = 2'-O-methyl uridine
  modified_base 73: mod_base = OTHER; note = 2'-O-methyl guanosine
  modified_base 74: mod_base = OTHER; note = 2'-O-methyl adenosine
  modified_base 75: mod_base = OTHER; note = 2'-O-methyl adenosine
  modified_base 76: mod_base = OTHER; note = 2'-O-methyl adenosine
  modified_base 77: mod_base = OTHER; note = 2'-O-methyl adenosine
  modified_base 78: mod_base = OTHER; note = 2'-O-methyl adenosine
  modified_base 79: mod_base = OTHER; note = 2'-O-methyl guanosine
  modified_base 80: mod_base = OTHER; note = 2'-O-methyl uridine
  modified_base 81: mod_base = OTHER; note = 2'-O-methyl guanosine
  modified_base 82: mod_base = OTHER; note = 2'-O-methyl guanosine
  modified_base 83: mod_base = OTHER; note = 2'-O-methyl cytidine
  modified_base 84: mod_base = OTHER; note = 2'-O-methyl adenosine
  modified_base 85: mod_base = OTHER; note = 2'-O-methyl cytidine
  modified_base 86: mod_base = OTHER; note = 2'-O-methyl cytidine
  modified_base 87: mod_base = OTHER; note = 2'-O-methyl guanosine
  modified_base 88: mod_base = OTHER; note = 2'-O-methyl adenosine
  modified_base 89: mod_base = OTHER; note = 2'-O-methyl guanosine
  modified_base 90: mod_base = OTHER; note = 2'-O-methyl uridine
  modified_base 91: mod_base = OTHER; note = 2'-O-methyl cytidine
  modified_base 92: mod_base = OTHER; note = 2'-O-methyl guanosine
  modified_base 93: mod_base = OTHER; note = 2'-O-methyl guanosine
  modified_base 94: mod_base = OTHER; note = 2'-O-methyl uridine
  modified_base 95: mod_base = OTHER; note = 2'-O-methyl guanosine
  modified_base 96: mod_base = OTHER; note = 2'-O-methyl cytidine
  modified_base 125: mod_base = OTHER; note = uridine phosphorothioate
  modified_base 126: mod_base = OTHER; note = 2'-O-methyl cytidine phosphorothioate
  modified_base 127: mod_base = OTHER; note = 2'-O-methyl cytidine phosphorothioate
  modified_base 128: mod_base = OTHER; note = 2'-O-methyl uridine
tcagaggaagctgggccaccgttttagagctagaaatagcaagttaaaataaggctagtccgttatcaacttgaaaaagtggcaccgagtcggtgctggagcggtaatggctggtggcccagcttcct

SEQ ID NO: 20620 - RNA, 127 nt, synthetic construct
  source 1..127: mol_type = other RNA
  modified_base 1: mod_base = OTHER; note = 2'-O-methyl guanosine phosphorothioate
  modified_base 2: mod_base = OTHER; note = 2'-O-methyl guanosine phosphorothioate
  modified_base 3: mod_base = OTHER; note = 2'-O-methyl adenosine phosphorothioate
  modified_base 29: mod_base = OTHER; note = 2'-O-methyl guanosine
  modified_base 30: mod_base = OTHER; note = 2'-O-methyl cytidine
  modified_base 31: mod_base = OTHER; note = 2'-O-methyl uridine
  modified_base 32: mod_base = OTHER; note = 2'-O-methyl adenosine
  modified_base 33: mod_base = OTHER; note = 2'-O-methyl guanosine
  modified_base 34: mod_base = OTHER; note = 2'-O-methyl adenosine
  modified_base 35: mod_base = OTHER; note = 2'-O-methyl adenosine
  modified_base 36: mod_base = OTHER; note = 2'-O-methyl adenosine
  modified_base 37: mod_base = OTHER; note = 2'-O-methyl uridine
  modified_base 38: mod_base = OTHER; note = 2'-O-methyl adenosine
  modified_base 39: mod_base = OTHER; note = 2'-O-methyl guanosine
  modified_base 40: mod_base = OTHER; note = 2'-O-methyl cytidine
  modified_base 69: mod_base = OTHER; note = 2'-O-methyl adenosine
  modified_base 70: mod_base = OTHER; note = 2'-O-methyl cytidine
  modified_base 71: mod_base = OTHER; note = 2'-O-methyl uridine
  modified_base 72: mod_base = OTHER; note = 2'-O-methyl uridine
  modified_base 73: mod_base = OTHER; note = 2'-O-methyl guanosine
  modified_base 74: mod_base = OTHER; note = 2'-O-methyl adenosine
  modified_base 75: mod_base = OTHER; note = 2'-O-methyl adenosine
  modified_base 76: mod_base = OTHER; note = 2'-O-methyl adenosine
  modified_base 77: mod_base = OTHER; note = 2'-O-methyl adenosine
  modified_base 78: mod_base = OTHER; note = 2'-O-methyl adenosine
  modified_base 79: mod_base = OTHER; note = 2'-O-methyl guanosine
  modified_base 80: mod_base = OTHER; note = 2'-O-methyl uridine
  modified_base 81: mod_base = OTHER; note = 2'-O-methyl guanosine
  modified_base 82: mod_base = OTHER; note = 2'-O-methyl guanosine
  modified_base 83: mod_base = OTHER; note = 2'-O-methyl cytidine
  modified_base 84: mod_base = OTHER; note = 2'-O-methyl adenosine
  modified_base 85: mod_base = OTHER; note = 2'-O-methyl cytidine
  modified_base 86: mod_base = OTHER; note = 2'-O-methyl cytidine
  modified_base 87: mod_base = OTHER; note = 2'-O-methyl guanosine
  modified_base 88: mod_base = OTHER; note = 2'-O-methyl adenosine
  modified_base 89: mod_base = OTHER; note = 2'-O-methyl guanosine
  modified_base 90: mod_base = OTHER; note = 2'-O-methyl uridine
  modified_base 91: mod_base = OTHER; note = 2'-O-methyl cytidine
  modified_base 92: mod_base = OTHER; note = 2'-O-methyl guanosine
  modified_base 93: mod_base = OTHER; note = 2'-O-methyl guanosine
  modified_base 94: mod_base = OTHER; note = 2'-O-methyl uridine
  modified_base 95: mod_base = OTHER; note = 2'-O-methyl guanosine
  modified_base 96: mod_base = OTHER; note = 2'-O-methyl cytidine
  modified_base 124: mod_base = OTHER; note = guanosine phosphorothioate
  modified_base 125: mod_base = OTHER; note = 2'-O-methyl guanosine phosphorothioate
  modified_base 126: mod_base = OTHER; note = 2'-O-methyl adenosine phosphorothioate
  modified_base 127: mod_base = OTHER; note = 2'-O-methyl cytidine
ggatggtcctcatgaacgacgttttagagctagaaatagcaagttaaaataaggctagtccgttatcaacttgaaaaagtggcaccgagtcggtgcaggcattaccgctccagtcgttcatgaggac

SEQ ID NO: 20621 - RNA, 125 nt, synthetic construct
  source 1..125: mol_type = other RNA
  modified_base 1: mod_base = OTHER; note = 2'-O-methyl guanosine phosphorothioate
  modified_base 2: mod_base = OTHER; note = 2'-O-methyl guanosine phosphorothioate
  modified_base 3: mod_base = OTHER; note = 2'-O-methyl adenosine phosphorothioate
  modified_base 29: mod_base = OTHER; note = 2'-O-methyl guanosine
  modified_base 30: mod_base = OTHER; note = 2'-O-methyl cytidine
  modified_base 31: mod_base = OTHER; note = 2'-O-methyl uridine
  modified_base 32: mod_base = OTHER; note = 2'-O-methyl adenosine
  modified_base 33: mod_base = OTHER; note = 2'-O-methyl guanosine
  modified_base 34: mod_base = OTHER; note = 2'-O-methyl adenosine
  modified_base 35: mod_base = OTHER; note = 2'-O-methyl adenosine
  modified_base 36: mod_base = OTHER; note = 2'-O-methyl adenosine
  modified_base 37: mod_base = OTHER; note = 2'-O-methyl uridine
  modified_base 38: mod_base = OTHER; note = 2'-O-methyl adenosine
  modified_base 39: mod_base = OTHER; note = 2'-O-methyl guanosine
  modified_base 40: mod_base = OTHER; note = 2'-O-methyl cytidine
  modified_base 69: mod_base = OTHER; note = 2'-O-methyl adenosine
  modified_base 70: mod_base = OTHER; note = 2'-O-methyl cytidine
  modified_base 71: mod_base = OTHER; note = 2'-O-methyl uridine
  modified_base 72: mod_base = OTHER; note = 2'-O-methyl uridine
  modified_base 73: mod_base = OTHER; note = 2'-O-methyl guanosine
  modified_base 74: mod_base = OTHER; note = 2'-O-methyl adenosine
  modified_base 75: mod_base = OTHER; note = 2'-O-methyl adenosine
  modified_base 76: mod_base = OTHER; note = 2'-O-methyl adenosine
  modified_base 77: mod_base = OTHER; note = 2'-O-methyl adenosine
  modified_base 78: mod_base = OTHER; note = 2'-O-methyl adenosine
  modified_base 79: mod_base = OTHER; note = 2'-O-methyl guanosine
  modified_base 80: mod_base = OTHER; note = 2'-O-methyl uridine
  modified_base 81: mod_base = OTHER; note = 2'-O-methyl guanosine
  modified_base 82: mod_base = OTHER; note = 2'-O-methyl guanosine
  modified_base 83: mod_base = OTHER; note = 2'-O-methyl cytidine
  modified_base 84: mod_base = OTHER; note = 2'-O-methyl adenosine
  modified_base 85: mod_base = OTHER; note = 2'-O-methyl cytidine
  modified_base 86: mod_base = OTHER; note = 2'-O-methyl cytidine
  modified_base 87: mod_base = OTHER; note = 2'-O-methyl guanosine
  modified_base 88: mod_base = OTHER; note = 2'-O-methyl adenosine
  modified_base 89: mod_base = OTHER; note = 2'-O-methyl guanosine
  modified_base 90: mod_base = OTHER; note = 2'-O-methyl uridine
  modified_base 91: mod_base = OTHER; note = 2'-O-methyl cytidine
  modified_base 92: mod_base = OTHER; note = 2'-O-methyl guanosine
  modified_base 93: mod_base = OTHER; note = 2'-O-methyl guanosine
  modified_base 94: mod_base = OTHER; note = 2'-O-methyl uridine
  modified_base 95: mod_base = OTHER; note = 2'-O-methyl guanosine
  modified_base 96: mod_base = OTHER; note = 2'-O-methyl cytidine
  modified_base 122: mod_base = OTHER; note = guanosine phosphorothioate
  modified_base 123: mod_base = OTHER; note = 2'-O-methyl adenosine phosphorothioate
  modified_base 124: mod_base = OTHER; note = 2'-O-methyl guanosine phosphorothioate
  modified_base 125: mod_base = OTHER; note = 2'-O-methyl guanosine
ggatggtcctcatgaacgacgttttagagctagaaatagcaagttaaaataaggctagtccgttatcaacttgaaaaagtggcaccgagtcggtgcaggcattaccgctccagtcgttcatgagg

SEQ ID NO: 20622 - protein, 2122 aa, synthetic construct
MPAAKRVKLDGGDKKYSIGLDIGTNSVGWAVITDEYKVPSKKFKVLGNTDRHSIKKNLIGALLFDSGETAEATRLKRTARRRYTRRKNRICYLQEIFSNEMAKVDDSFFHRLEESFLVEEDKKHERHPIFGNIVDEVAYHEKYPTIYHLRKKLVDSTDKADLRLIYLALAHMIKFRGHFLIEGDLNPDNSDVDKLFIQLVQTYNQLFEENPINASGVDAKAILSARLSKSRRLENLIAQLPGEKKNGLFGNLIALSLGLTPNFKSNFDLAEDAKLQLSKDTYDDDLDNLLAQIGDQYADLFLAAKNLSDAILLSDILRVNTEITKAPLSASMIKRYDEHHQDLTLLKALVRQQLPEKYKEIFFDQSKNGYAGYIDGGASQEEFYKFIKPILEKMDGTEELLVKLNREDLLRKQRTFDNGSIPHQIHLGELHAILRRQEDFYPFLKDNREKIEKILTFRIPYYVGPLARGNSRFAWMTRKSEETITPWNFEEVVDKGASAQSFIERMTNFDKNLPNEKVLPKHSLLYEYFTVYNELTKVKYVTEGMRKPAFLSGEQKKAIVDLLFKTNRKVTVKQLKEDYFKKIECFDSVEISGVEDRFNASLGTYHDLLKIIKDKDFLDNEENEDILEDIVLTLTLFEDREMIEERLKTYAHLFDDKVMKQLKRRRYTGWGRLSRKLINGIRDKQSGKTILDFLKSDGFANRNFMQLIHDDSLTFKEDIQKAQVSGQGDSLHEHIANLAGSPAIKKGILQTVKVVDELVKVMGRHKPENIVIEMARENQTTQKGQKNSRERMKRIEEGIKELGSQILKEHPVENTQLQNEKLYLYYLQNGRDMYVDQELDINRLSDYDVDHIVPQSFLKDDSIDNKVLTRSDKARGKSDNVPSEEVVKKMKNYWRQLLNAKLITQRKFDNLTKAERGGLSELDKAGFIKRQLVETRQITKHVAQILDSRMNTKYDENDKLIREVKVITLKSKLVSDFRKDFQFYKVREINNYHHAHDAYLNAVVGTALIKKYPKLESEFVYGDYKVYDVRKMIAKSEQEIGKATAKYFFYSNIMNFFKTEITLANGEIRKRPLIETNGETGEIVWDKGRDFATVRKVLSMPQVNIVKKTEVQTGGFSKESILPKRNSDKLIARKKDWDPKKYGGFDSPTVAYSVLVVAKVEKGKSKKLKSVKELLGITIMERSSFEKNPIDFLEAKGYKEVKKDLIIKLPKYSLFELENGRKRMLASAGELQKGNELALPSKYVNFLYLASHYEKLKGSPEDNEQKQLFVEQHKHYLDEIIEQISEFSKRVILADANLDKVLSAYNKHRDKPIREQAENIIHLFTLTNLGAPAAFKYFDTTIDRKRYTSTKEVLDATLIHQSITGLYETRIDLSQLGGDSGGSSGGSSGSETPGTSESATPESSGGSSGGSSTLNIEDEYRLHETSKEPDVSLGSTWLSDFPQAWAETGGMGLAVRQAPLIIPLKATSTPVSIKQYPMSQEARLGIKPHIQRLLDQGILVPCQSPWNTPLLPVKKPGTNDYRPVQDLREVNKRVEDIHPTVPNPYNLLSGLPPSHQWYTVLDLKDAFFCLRLHPTSQPLFAFEWRDPEMGISGQLTWTRLPQGFKNSPTLFNEALHRDLADFRIQHPDLILLQYVDDLLLAATSELDCQQGTRALLQTLGNLGYRASAKKAQICQKQVKYLGYLLKEGQRWLTEARKETVMGQPTPKTPRQLREFLGKAGFCRLFIPGFAEMAAPLYPLTKPGTLFNWGPDQQKAYQEIKQALLTAPALGLPDLTKPFELFVDEKQGYAKGVLTQKLGPWRRPVAYLSKKLDPVAAGWPPCLRMVAAIAVLTKDAGKLTMGQPLVILAPHAVEALVKQPPDRWLSNARMTHYQALLLDTDRVQFGPVVALNPATLLPLPEEGLQHNCLDILAEAHGTRPDLTDQPLPDADHTWYTDGSSLLQEGQRKAGAAVTTETEVIWAKALPAGTSAQRAELIALTQALKMAEGKKLNVYTDSRYAFATAHIHGEIYRRRGWLTSEGKEIKNKDEILALLKALFLPKRLSIIHCPGHQKGHSAEARGNRMADQAARKAAITETPDTSTLLIENSSPSGGSKRTADGSEFEKRTADGSEFESPKKKAKVE

SEQ ID NO: 20623 - protein, 2122 aa, synthetic construct
MPAAKRVKLDGGDKKYSIGLDIGTNSVGWAVITDEYKVPSKKFKVLGNTDRHSIKKNLIGALLFDSGETAEATRLKRTARRRYTRRKNRICYLQEIFSNEMAKVDDSFFHRLEESFLVEEDKKHERHPIFGNIVDEVAYHEKYPTIYHLRKKLVDSTDKADLRLIYLALAHMIKFRGHFLIEGDLNPDNSDVDKLFIQLVQTYNQLFEENPINASGVDAKAILSARLSKSRRLENLIAQLPGEKKNGLFGNLIALSLGLTPNFKSNFDLAEDAKLQLSKDTYDDDLDNLLAQIGDQYADLFLAAKNLSDAILLSDILRVNTEITKAPLSASMIKRYDEHHQDLTLLKALVRQQLPEKYKEIFFDQSKNGYAGYIDGGASQEEFYKFIKPILEKMDGTEELLVKLNREDLLRKQRTFDNGSIPHQIHLGELHAILRRQEDFYPFLKDNREKIEKILTFRIPYYVGPLARGNSRFAWMTRKSEETITPWNFEEVVDKGASAQSFIERMTNFDKNLPNEKVLPKHSLLYEYFTVYNELTKVKYVTEGMRKPAFLSGEQKKAIVDLLFKTNRKVTVKQLKEDYFKKIECFDSVEISGVEDRFNASLGTYHDLLKIIKDKDFLDNEENEDILEDIVLTLTLFEDREMIEERLKTYAHLFDDKVMKQLKRRRYTGWGRLSRKLINGIRDKQSGKTILDFLKSDGFANRNFMQLIHDDSLTFKEDIQKAQVSGQGDSLHEHIANLAGSPAIKKGILQTVKVVDELVKVMGRHKPENIVIEMARENQTTQKGQKNSRERMKRIEEGIKELGSQILKEHPVENTQLQNEKLYLYYLQNGRDMYVDQELDINRLSDYDVDHIVPQSFLKDDSIDNKVLTRSDKNRGKSDNVPSEEVVKKMKNYWRQLLNAKLITQRKFDNLTKAERGGLSELDKAGFIKRQLVETRQITKHVAQILDSRMNTKYDENDKLIREVKVITLKSKLVSDFRKDFQFYKVREINNYHHAHDAYLNAVVGTALIKKYPKLESEFVYGDYKVYDVRKMIAKSEQEIGKATAKYFFYSNIMNFFKTEITLANGEIRKRPLIETNGETGEIVWDKGRDFATVRKVLSMPQVNIVKKTEVQTGGFSKESILPKRNSDKLIARKKDWDPKKYGGFDSPTVAYSVLVVAKVEKGKSKKLKSVKELLGITIMERSSFEKNPIDFLEAKGYKEVKKDLIIKLPKYSLFELENGRKRMLASAGELQKGNELALPSKYVNFLYLASHYEKLKGSPEDNEQKQLFVEQHKHYLDEIIEQISEFSKRVILADANLDKVLSAYNKHRDKPIREQAENIIHLFTLTNLGAPAAFKYFDTTIDRKRYTSTKEVLDATLIHQSITGLYETRIDLSQLGGDSGGSSGGSSGSETPGTSESATPESSGGSSGGSSTLNIEDEYRLHETSKEPDVSLGSTWLSDFPQAWAETGGMGLAVRQAPLIIPLKATSTPVSIKQYPMSQEARLGIKPHIQRLLDQGILVPCQSPWNTPLLPVKKPGTNDYRPVQDLREVNKRVEDIHPTVPNPYNLLSGLPPSHQWYTVLDLKDAFFCLRLHPTSQPLFAFEWRDPEMGISGQLTWTRLPQGFKNSPTLFNEALHRDLADFRIQHPDLILLQYVDDLLLAATSELDCQQGTRALLQTLGNLGYRASAKKAQICQKQVKYLGYLLKEGQRWLTEARKETVMGQPTPKTPRQLREFLGKAGFCRLFIPGFAEMAAPLYPLTKPGTLFNWGPDQQKAYQEIKQALLTAPALGLPDLTKPFELFVDEKQGYAKGVLTQKLGPWRRPVAYLSKKLDPVAAGWPPCLRMVAAIAVLTKDAGKLTMGQPLVILAPHAVEALVKQPPDRWLSNARMTHYQALLLDTDRVQFGPVVALNPATLLPLPEEGLQHNCLDILAEAHGTRPDLTDQPLPDADHTWYTDGSSLLQEGQRKAGAAVTTETEVIWAKALPAGTSAQRAELIALTQALKMAEGKKLNVYTDSRYAFATAHIHGEIYRRRGWLTSEGKEIKNKDEILALLKALFLPKRLSIIHCPGHQKGHSAEARGNRMADQAARKAAITETPDTSTLLIENSSPSGGSKRTADGSEFEKRTADGSEFESPKKKAKVE

SEQ ID NO: 20624 - RNA, 122 nt, synthetic construct; identical to SEQ ID NO: 20616
  source 1..122: mol_type = other RNA
  modified_base 1: mod_base = OTHER; note = 2'-O-methyl guanosine phosphorothioate
  modified_base 2: mod_base = OTHER; note = 2'-O-methyl guanosine phosphorothioate
  modified_base 3: mod_base = OTHER; note = 2'-O-methyl adenosine phosphorothioate
  modified_base 29: mod_base = OTHER; note = 2'-O-methyl guanosine
  modified_base 30: mod_base = OTHER; note = 2'-O-methyl cytidine
  modified_base 31: mod_base = OTHER; note = 2'-O-methyl uridine
  modified_base 32: mod_base = OTHER; note = 2'-O-methyl adenosine
  modified_base 33: mod_base = OTHER; note = 2'-O-methyl guanosine
  modified_base 34: mod_base = OTHER; note = 2'-O-methyl adenosine
  modified_base 35: mod_base = OTHER; note = 2'-O-methyl adenosine
  modified_base 36: mod_base = OTHER; note = 2'-O-methyl adenosine
  modified_base 37: mod_base = OTHER; note = 2'-O-methyl uridine
  modified_base 38: mod_base = OTHER; note = 2'-O-methyl adenosine
  modified_base 39: mod_base = OTHER; note = 2'-O-methyl guanosine
  modified_base 40: mod_base = OTHER; note = 2'-O-methyl cytidine
  modified_base 69: mod_base = OTHER; note = 2'-O-methyl adenosine
  modified_base 70: mod_base = OTHER; note = 2'-O-methyl cytidine
  modified_base 71: mod_base = OTHER; note = 2'-O-methyl uridine
  modified_base 72: mod_base = OTHER; note = 2'-O-methyl uridine
  modified_base 73: mod_base = OTHER; note = 2'-O-methyl guanosine
  modified_base 74: mod_base = OTHER; note = 2'-O-methyl adenosine
  modified_base 75: mod_base = OTHER; note = 2'-O-methyl adenosine
  modified_base 76: mod_base = OTHER; note = 2'-O-methyl adenosine
  modified_base 77: mod_base = OTHER; note = 2'-O-methyl adenosine
  modified_base 78: mod_base = OTHER; note = 2'-O-methyl adenosine
  modified_base 79: mod_base = OTHER; note = 2'-O-methyl guanosine
  modified_base 80: mod_base = OTHER; note = 2'-O-methyl uridine
  modified_base 81: mod_base = OTHER; note = 2'-O-methyl guanosine
  modified_base 82: mod_base = OTHER; note = 2'-O-methyl guanosine
  modified_base 83: mod_base = OTHER; note = 2'-O-methyl cytidine
  modified_base 84: mod_base = OTHER; note = 2'-O-methyl adenosine
  modified_base 85: mod_base = OTHER; note = 2'-O-methyl cytidine
  modified_base 86: mod_base = OTHER; note = 2'-O-methyl cytidine
  modified_base 87: mod_base = OTHER; note = 2'-O-methyl guanosine
  modified_base 88: mod_base = OTHER; note = 2'-O-methyl adenosine
  modified_base 89: mod_base = OTHER; note = 2'-O-methyl guanosine
  modified_base 90: mod_base = OTHER; note = 2'-O-methyl uridine
  modified_base 91: mod_base = OTHER; note = 2'-O-methyl cytidine
  modified_base 92: mod_base = OTHER; note = 2'-O-methyl guanosine
  modified_base 93: mod_base = OTHER; note = 2'-O-methyl guanosine
  modified_base 94: mod_base = OTHER; note = 2'-O-methyl uridine
  modified_base 95: mod_base = OTHER; note = 2'-O-methyl guanosine
  modified_base 96: mod_base = OTHER; note = 2'-O-methyl cytidine
  modified_base 119: mod_base = OTHER; note = guanosine phosphorothioate
  modified_base 120: mod_base = OTHER; note = 2'-O-methyl guanosine phosphorothioate
  modified_base 121: mod_base = OTHER; note = 2'-O-methyl adenosine phosphorothioate
  modified_base 122: mod_base = OTHER; note = 2'-O-methyl cytidine

SEQ ID NO: 20625 - RNA, 121 nt, synthetic construct; identical to SEQ ID NO: 20617
  source 1..121: mol_type = other RNA
  modified_base 1: mod_base = OTHER; note = 2'-O-methyl guanosine phosphorothioate
  modified_base 2: mod_base = OTHER; note = 2'-O-methyl guanosine phosphorothioate
  modified_base 3: mod_base = OTHER; note = 2'-O-methyl adenosine phosphorothioate
  modified_base 29: mod_base = OTHER; note = 2'-O-methyl guanosine
  modified_base 30: mod_base = OTHER; note = 2'-O-methyl cytidine
  modified_base 31: mod_base = OTHER; note = 2'-O-methyl uridine
  modified_base 32: mod_base = OTHER; note = 2'-O-methyl adenosine
  modified_base 33: mod_base = OTHER; note = 2'-O-methyl guanosine
  modified_base 34: mod_base = OTHER; note = 2'-O-methyl adenosine
  modified_base 35: mod_base = OTHER; note = 2'-O-methyl adenosine
  modified_base 36: mod_base = OTHER; note = 2'-O-methyl adenosine
  modified_base 37: mod_base = OTHER; note = 2'-O-methyl uridine
  modified_base 38: mod_base = OTHER; note = 2'-O-methyl adenosine
  modified_base 39: mod_base = OTHER; note = 2'-O-methyl guanosine
  modified_base 40: mod_base = OTHER; note = 2'-O-methyl cytidine
  modified_base 69: mod_base = OTHER; note = 2'-O-methyl adenosine
  modified_base 70: mod_base = OTHER; note = 2'-O-methyl cytidine
  modified_base 71: mod_base = OTHER; note = 2'-O-methyl uridine
  modified_base 72: mod_base = OTHER; note = 2'-O-methyl uridine
  modified_base 73: mod_base = OTHER; note = 2'-O-methyl guanosine
  modified_base 74: mod_base = OTHER; note = 2'-O-methyl adenosine
  modified_base 75: mod_base = OTHER; note = 2'-O-methyl adenosine
  modified_base 76: mod_base = OTHER; note = 2'-O-methyl adenosine
  modified_base 77: mod_base = OTHER; note = 2'-O-methyl adenosine
  modified_base 78: mod_base = OTHER; note = 2'-O-methyl adenosine
  modified_base 79: mod_base = OTHER; note = 2'-O-methyl guanosine
  modified_base 80: mod_base = OTHER; note = 2'-O-methyl uridine
  modified_base 81: mod_base = OTHER; note = 2'-O-methyl guanosine
  modified_base 82: mod_base = OTHER; note = 2'-O-methyl guanosine
  modified_base 83: mod_base = OTHER; note = 2'-O-methyl cytidine
  modified_base 84: mod_base = OTHER; note = 2'-O-methyl adenosine
  modified_base 85: mod_base = OTHER; note = 2'-O-methyl cytidine
  modified_base 86: mod_base = OTHER; note = 2'-O-methyl cytidine
  modified_base 87: mod_base = OTHER; note = 2'-O-methyl guanosine
  modified_base 88: mod_base = OTHER; note = 2'-O-methyl adenosine
  modified_base 89: mod_base = OTHER; note = 2'-O-methyl guanosine
  modified_base 90: mod_base = OTHER; note = 2'-O-methyl uridine
  modified_base 91: mod_base = OTHER; note = 2'-O-methyl cytidine
  modified_base 92: mod_base = OTHER; note = 2'-O-methyl guanosine
  modified_base 93: mod_base = OTHER; note = 2'-O-methyl guanosine
  modified_base 94: mod_base = OTHER; note = 2'-O-methyl uridine
  modified_base 95: mod_base = OTHER; note = 2'-O-methyl guanosine
  modified_base 96: mod_base = OTHER; note = 2'-O-methyl cytidine
  modified_base 118: mod_base = OTHER; note = guanosine phosphorothioate
  modified_base 119: mod_base = OTHER; note = 2'-O-methyl adenosine phosphorothioate
  modified_base 120: mod_base = OTHER; note = 2'-O-methyl guanosine phosphorothioate
  modified_base 121: mod_base = OTHER; note = 2'-O-methyl guanosine

SEQ ID NO: 20626 - RNA, 126 nt, synthetic construct; identical to SEQ ID NO: 20618
  source 1..126: mol_type = other RNA
  modified_base 1: mod_base = OTHER; note = 2'-O-methyl uridine phosphorothioate
  modified_base 2: mod_base = OTHER; note = 2'-O-methyl cytidine phosphorothioate
  modified_base 3: mod_base = OTHER; note = 2'-O-methyl adenosine phosphorothioate
  modified_base 29: mod_base = OTHER; note = 2'-O-methyl guanosine
  modified_base 30: mod_base = OTHER; note = 2'-O-methyl cytidine
  modified_base 31: mod_base = OTHER; note = 2'-O-methyl uridine
  modified_base 32: mod_base = OTHER; note = 2'-O-methyl adenosine
  modified_base 33: mod_base = OTHER; note = 2'-O-methyl guanosine
  modified_base 34: mod_base = OTHER; note = 2'-O-methyl adenosine
  modified_base 35: mod_base = OTHER; note = 2'-O-methyl adenosine
  modified_base 36: mod_base = OTHER; note = 2'-O-methyl adenosine
  modified_base 37: mod_base = OTHER; note = 2'-O-methyl uridine
  modified_base 38: mod_base = OTHER; note = 2'-O-methyl adenosine
  modified_base 39: mod_base = OTHER; note = 2'-O-methyl guanosine
  modified_base 40: mod_base = OTHER; note = 2'-O-methyl cytidine
  modified_base 69: mod_base = OTHER; note = 2'-O-methyl adenosine
  modified_base 70: mod_base = OTHER; note = 2'-O-methyl cytidine
  modified_base 71: mod_base = OTHER; note = 2'-O-methyl uridine
  modified_base 72: mod_base = OTHER; note = 2'-O-methyl uridine
  modified_base 73: mod_base = OTHER; note = 2'-O-methyl guanosine
  modified_base 74: mod_base = OTHER; note = 2'-O-methyl adenosine
  modified_base 75: mod_base = OTHER; note = 2'-O-methyl adenosine
  modified_base 76: mod_base = OTHER; note = 2'-O-methyl adenosine
  modified_base 77: mod_base = OTHER; note = 2'-O-methyl adenosine
  modified_base 78: mod_base = OTHER; note = 2'-O-methyl adenosine
  modified_base 79: mod_base = OTHER; note = 2'-O-methyl guanosine
  modified_base 80: mod_base = OTHER; note = 2'-O-methyl uridine
  modified_base 81: mod_base = OTHER; note = 2'-O-methyl guanosine
  modified_base 82: mod_base = OTHER; note = 2'-O-methyl guanosine
  modified_base 83: mod_base = OTHER; note = 2'-O-methyl cytidine
  modified_base 84: mod_base = OTHER; note = 2'-O-methyl adenosine
  modified_base 85: mod_base = OTHER; note = 2'-O-methyl cytidine
  modified_base 86: mod_base = OTHER; note = 2'-O-methyl cytidine
  modified_base 87: mod_base = OTHER; note = 2'-O-methyl guanosine
  modified_base 88: mod_base = OTHER; note = 2'-O-methyl adenosine
  modified_base 89: mod_base = OTHER; note = 2'-O-methyl guanosine
  modified_base 90: mod_base = OTHER; note = 2'-O-methyl uridine
  modified_base 91: mod_base = OTHER; note = 2'-O-methyl cytidine
  modified_base 92: mod_base = OTHER; note = 2'-O-methyl guanosine
  modified_base 93: mod_base = OTHER; note = 2'-O-methyl guanosine
  modified_base 94: mod_base = OTHER; note = 2'-O-methyl uridine
  modified_base 95: mod_base = OTHER; note = 2'-O-methyl guanosine
  modified_base 96: mod_base = OTHER; note = 2'-O-methyl cytidine
  modified_base 123: mod_base = OTHER; note = cytidine phosphorothioate
  modified_base 124: mod_base = OTHER; note = 2'-O-methyl uridine phosphorothioate
  modified_base 125: mod_base = OTHER; note = 2'-O-methyl uridine phosphorothioate
  modified_base 126: mod_base = OTHER; note = 2'-O-methyl cytidine

SEQ ID NO: 20627 - RNA, 128 nt, synthetic construct; identical to SEQ ID NO: 20619
  source 1..128: mol_type = other RNA
  modified_base 1: mod_base = OTHER; note = 2'-O-methyl uridine phosphorothioate
  modified_base 2: mod_base = OTHER; note = 2'-O-methyl cytidine phosphorothioate
  modified_base 3: mod_base = OTHER; note = 2'-O-methyl adenosine phosphorothioate
  modified_base 29: mod_base = OTHER; note = 2'-O-methyl guanosine
  modified_base 30: mod_base = OTHER; note = 2'-O-methyl cytidine
  modified_base 31: mod_base = OTHER; note = 2'-O-methyl uridine
  modified_base 32: mod_base = OTHER; note = 2'-O-methyl adenosine
  modified_base 33: mod_base = OTHER; note = 2'-O-methyl guanosine
  modified_base 34: mod_base = OTHER; note = 2'-O-methyl adenosine
  modified_base 35: mod_base = OTHER; note = 2'-O-methyl adenosine
  modified_base 36: mod_base = OTHER; note = 2'-O-methyl adenosine
  modified_base 37: mod_base = OTHER; note = 2'-O-methyl uridine
  modified_base 38: mod_base = OTHER; note = 2'-O-methyl adenosine
  modified_base 39: mod_base = OTHER; note = 2'-O-methyl guanosine
  modified_base 40: mod_base = OTHER; note = 2'-O-methyl cytidine
  modified_base 69: mod_base = OTHER; note = 2'-O-methyl adenosine
  modified_base 70: mod_base = OTHER; note = 2'-O-methyl cytidine
  modified_base 71: mod_base = OTHER; note = 2'-O-methyl uridine
  modified_base 72: mod_base = OTHER; note = 2'-O-methyl uridine
  modified_base 73: mod_base = OTHER; note = 2'-O-methyl guanosine
  modified_base 74: mod_base = OTHER; note = 2'-O-methyl adenosine
  modified_base 75: mod_base = OTHER; note = 2'-O-methyl adenosine
  modified_base 76: mod_base = OTHER; note = 2'-O-methyl adenosine
  modified_base 77: mod_base = OTHER; note = 2'-O-methyl adenosine
  modified_base 78: mod_base = OTHER; note = 2'-O-methyl adenosine
  modified_base 79: mod_base = OTHER; note = 2'-O-methyl guanosine
  modified_base 80: mod_base = OTHER; note = 2'-O-methyl uridine
  modified_base 81: mod_base = OTHER; note = 2'-O-methyl guanosine
  modified_base 82: mod_base = OTHER; note = 2'-O-methyl guanosine
  modified_base 83: mod_base = OTHER; note = 2'-O-methyl cytidine
  modified_base 84: mod_base = OTHER; note = 2'-O-methyl adenosine
  modified_base 85: mod_base = OTHER; note = 2'-O-methyl cytidine
  modified_base 86: mod_base = OTHER; note = 2'-O-methyl cytidine
  modified_base 87: mod_base = OTHER; note = 2'-O-methyl guanosine
  modified_base 88: mod_base = OTHER; note = 2'-O-methyl adenosine
  modified_base 89: mod_base = OTHER; note = 2'-O-methyl guanosine
  modified_base 90: mod_base = OTHER; note = 2'-O-methyl uridine
  modified_base 91: mod_base = OTHER; note = 2'-O-methyl cytidine
  modified_base 92: mod_base = OTHER; note = 2'-O-methyl guanosine
  modified_base 93: mod_base = OTHER; note = 2'-O-methyl guanosine
  modified_base 94: mod_base = OTHER; note = 2'-O-methyl uridine
  modified_base 95: mod_base = OTHER; note = 2'-O-methyl guanosine
  modified_base 96: mod_base = OTHER; note = 2'-O-methyl cytidine
  modified_base 125: mod_base = OTHER; note = uridine phosphorothioate
  modified_base 126: mod_base = OTHER; note = 2'-O-methyl cytidine phosphorothioate
  modified_base 127: mod_base = OTHER; note = 2'-O-methyl cytidine phosphorothioate
  modified_base 128: mod_base = OTHER; note = 2'-O-methyl uridine

SEQ ID NO: 20628 - RNA, 6369 nt, synthetic construct
  source 1..6369: mol_type = other RNA
atgcctgcggctaagcgggtaaaattggatggtggggacaagaagtacagcatcggcctggacatcggcaccaactctgtgggctgggccgtgatcaccgacgagtacaaggtgcccagcaagaaattcaaggtgctgggcaacaccgaccggcacagcatcaagaagaacctgatcggagccctgctgttcgacagcggcgaaacagccgaggccacccggctgaagagaaccgccagaagaagatacaccagacggaagaaccggatctgctatctgcaagagatcttcagcaacgagatggccaaggtggacgacagcttcttccacagactggaagagtccttcctggtggaagaggataagaagcacgagcggcaccccatcttcggcaacatcgtggacgaggtggcctaccacgagaagtaccccaccatctaccacctgagaaagaaactggtggacagcaccgacaaggccgacctgcggctgatctatctggccctggcccacatgatcaagttccggggccacttcctgatcgagggcgacctgaaccccgacaacagcgacgtggacaagctgttcatccagctggtgcagacctacaaccagctgttcgaggaaaaccccatcaacgccagcggcgtggacgccaaggccatcctgtctgccagactgagcaagagcagacggctggaaaatctgatcgcccagctgcccggcgagaagaagaatggcctgttcggaaacctgattgccctgagcctgggcctgacccccaacttcaagagcaacttcgacctggccgaggatgccaaactgcagctgagcaaggacacctacgacgacgacctggacaacctgctggcccagatcggcgaccagtacgccgacctgtttctggccgccaagaacctgtccgacgccatcctgctgagcgacatcctgagagtgaacaccgagatcaccaaggcccccctgagcgcctctatgatcaagagatacgacgagcaccaccaggacctgaccctgctgaaagctctcgtgcggcagcagctgcctgagaagtacaaagagattttcttcgaccagagcaagaacggctacgccggctacattgacggcggagccagccaggaagagttctacaagttcatcaagcccatcctggaaaagatggacggcaccgaggaactgctcgtgaagctgaacagagaggacctgctgcggaagcagcggaccttcgacaacggcagcatcccccaccagatccacctgggagagctgcacgccattctgcggcggcaggaagatttttacccattcctgaaggacaaccgggaaaagatcgagaagatcctgaccttccgcatcccctactacgtgggccctctggccaggggaaacagcagattcgcctggatgaccagaaagagcgaggaaaccatcaccccctggaacttcgaggaagtggtggacaagggcgcttccgcccagagcttcatcgagcggatgaccaacttcgataagaacctgcccaacgagaaggtgctgcccaagcacagcctgctgtacgagtacttcaccgtgtataacgagctgaccaaagtgaaatacgtgaccgagggaatgagaaagcccgccttcctgagcggcgagcagaaaaaggccatcgtggacctgctgttcaagaccaaccggaaagtgaccgtgaagcagctgaaagaggactacttcaagaaaatcgagtgcttcgactccgtggaaatctccggcgtggaagatcggttcaacgcctccctgggcacataccacgatctgctgaaaattatcaaggacaaggacttcctggacaatgaggaaaacgaggacattctggaagatatcgtgctgaccctgacactgtttgaggacagagagatgatcgaggaacggctgaaaacctatgcccacctgttcgacgacaaagtgatgaagcagctgaagcggcggagatacaccggctggggcaggctgagccggaagctgatcaacggcatccgggacaagcagtccggcaagacaatcctggatttcctgaagtccgacggcttcgccaacagaaacttcatgcagctgatccacgacgacagcctgacctttaaagaggacatccagaaagcccaggtgtccggccagggcgatagcctgcacgagcacattgccaatctggccggcagccccgccattaagaagggcatcctgcagacagtgaaggtggtggacgagctcgtgaaagtgatgggccggcacaagcccgagaacatcgtgatcgaaatggccagagagaaccagaccacccagaagggacagaagaacagccgcgagagaatgaagcggatcgaagagggcatcaaagagctgggcagccagatcctgaaagaacaccccgtggaaaacacccagctgcagaacgagaagctgtacctgtactacctgcagaatgggcgggatatgtacgtggaccaggaactggacatcaaccggctgtccgactacgatgtggaccatatcgtgcctcagagctttctgaaggacgactccatcgacaacaaggtgctgaccagaagcgacaagaatcggggcaagagcgacaacgtgccctccgaagaggtcgtgaagaagatgaagaactactggcggcagctgctgaacgccaagctgattacccagagaaagttcgacaatctgaccaaggccgagagaggcggcctgagcgaactggataaggccggcttcatcaagagacagctggtggaaacccggcagatcacaaagcacgtggcacagatcctggactcccggatgaacactaagtacgacgagaatgacaagctgatccgggaagtgaaagtgatcaccctgaagtccaagctggtgtccgatttccggaaggatttccagttttacaaagtgcgcgagatcaacaactaccaccacgcccacgacgcctacctgaacgccgtcgtgggaaccgccctgatcaaaaagtaccctaagctggaaagcgagttcgtgtacggcgactacaaggtgtacgacgtgcggaagatgatcgccaagagcgagcaggaaatcggcaaggctaccgccaagtacttcttctacagcaacatcatgaactttttcaagaccgagattaccctggccaacggcgagatccggaagcggcctctgatcgagacaaacggcgaaaccggggagatcgtgtgggataagggccgggattttgccaccgtgcggaaagtgctgagcatgccccaagtgaatatcgtgaaaaagaccgaggtgcagacaggcggcttcagcaaagagtctatcctgcccaagaggaacagcgataagctgatcgccagaaagaaggactgggaccctaagaagtacggcggcttcgacagccccaccgtggcctattctgtgctggtggtggccaaagtggaaaagggcaagtccaagaaactgaagagtgtgaaagagctgctggggatcaccatcatggaaagaagcagcttcgagaagaatcccatcgactttctggaagccaagggctacaaagaagtgaaaaaggacctgatcatcaagctgcctaagtactccctgttcgagctggaaaacggccggaagagaatgctggcctctgccggcgaactgcagaagggaaacgaactggccctgccctccaaatatgtgaacttcctgtacctggccagccactatgagaagctgaagggctcccccgaggataatgagcagaaacagctgtttgtggaacagcacaagcactacctggacgagatcatcgagcagatcagcgagttctccaagagagtgatcctggccgacgctaatctggacaaagtgctgtccgcctacaacaagcaccgggataagcccatcagagagcaggccgagaatatcatccacctgtttaccctgaccaatctgggagcccctgccgccttcaagtactttgacaccaccatcgaccggaagaggtacaccagcaccaaagaggtgctggacgccaccctgatccaccagagcatcaccggcctgtacgagacacggatcgacctgtctcagctgggaggtgactctggaggatctagcggaggatcctctggcagcgagacaccaggaacaagcgagtcagcaacaccagagagcagtggcggcagcagcggcggcagcagcaccctaaatatagaagatgagtatcggctacatgagacctcaaaagagccagatgtttctctagggtccacatggctgtctgattttcctcaggcctgggcggaaaccgggggcatgggactggcagttcgccaagctcctctgatcatacctctgaaagcaacctctacccccgtgtccataaaacaataccccatgtcacaagaagccagactggggatcaagccccacatacagagactgttggaccagggaatactggtaccctgccagtccccctggaacacgcccctgctacccgttaagaaaccagggactaatgattataggcctgtccaggatctgagagaagtcaacaagcgggtggaggacatccaccccaccgtgcccaacccttacaacctcttgagcgggctcccaccgtcccaccagtggtacactgtgcttgatttaaaggatgcctttttctgcctgagactccaccccaccagtcagcctctcttcgcctttgagtggagagatccagagatgggaatctcaggacaattgacctggaccagactcccacagggtttcaaaaacagtcccaccctgtttaatgaggcactgcacagagacctagcagacttccggatccagcacccagacttgatcctgctacagtacgtggatgacttactgctggccgccacttctgagctagactgccaacaaggtactcgggccctgttacaaaccctagggaacctcgggtatcgggcctcggccaagaaagcccaaatttgccagaaacaggtcaagtatctggggtatcttctaaaagagggtcagagatggctgactgaggccagaaaagagactgtgatggggcagcctactccgaagacccctcgacaactaagggagttcctagggaaggcaggcttctgtcgcctcttcatccctgggtttgcagaaatggcagcccccctgtaccctctcaccaaaccggggactctgtttaattggggcccagaccaacaaaaggcctatcaagaaatcaagcaagcccttctaactgccccagccctggggttgccagatttgactaagccctttgaactctttgtcgacgagaagcagggctacgccaaaggtgtcctaacgcaaaaactgggaccttggcgtcggccggtggcctacctgtccaaaaagctagacccagtagcagctgggtggcccccttgcctacggatggtagcagccattgccgtactgacaaaggatgcaggcaagctaaccatgggacagccactagtcattctggccccccatgcagtagaggcactagtcaaacaaccccccgaccgctggctttccaacgcccggatgactcactatcaggccttgcttttggacacggaccgggtccagttcggaccggtggtagccctgaacccggctacgctgctcccactgcctgaggaagggctgcaacacaactgccttgatatcctggccgaagcccacggaacccgacccgacctaacggaccagccgctcccagacgccgaccacacctggtacacggatggaagcagtctcttacaagagggacagcgtaaggcgggagctgcggtgaccaccgagaccgaggtaatctgggctaaagccctgccagccgggacatccgctcagcgggctgaactgatagcactcacccaggccctaaagatggcagaaggtaagaagctaaatgtttatactgatagccgttatgcttttgctactgcccatatccatggagaaatatacagaaggcgtgggtggctcacatcagaaggcaaagagatcaaaaataaagacgagatcttggccctactaaaagccctctttctgcccaaaagacttagcataatccattgtccaggacatcaaaagggacacagcgccgaggctagaggcaaccggatggctgaccaagcggcccgaaaggcagccatcacagagactccagacacctctaccctcctcatagaaaattcatcaccctctggcggctcaaaaagaaccgccgacggcagcgaattcgagaaaaggacggcggatggtagcgaattcgagagccctaaaaagaaggccaaggtagagtaa

SEQ ID NO: 20629 - RNA, 100 nt, synthetic construct
  source 1..100: mol_type = other RNA
  modified_base 1: mod_base = OTHER; note = 2'-O-methyl adenosine phosphorothioate
  modified_base 2: mod_base = OTHER; note = 2'-O-methyl cytidine phosphorothioate
  modified_base 3: mod_base = OTHER; note = 2'-O-methyl adenosine phosphorothioate
  modified_base 29: mod_base = OTHER; note = 2'-O-methyl guanosine
  modified_base 30: mod_base = OTHER; note = 2'-O-methyl cytidine
  modified_base 31: mod_base = OTHER; note = 2'-O-methyl uridine
  modified_base 32: mod_base = OTHER; note = 2'-O-methyl adenosine
  modified_base 33: mod_base = OTHER; note = 2'-O-methyl guanosine
  modified_base 34: mod_base = OTHER; note = 2'-O-methyl adenosine
  modified_base 35: mod_base = OTHER; note = 2'-O-methyl adenosine
  modified_base 36: mod_base = OTHER; note = 2'-O-methyl adenosine
  modified_base 37: mod_base = OTHER; note = 2'-O-methyl uridine
  modified_base 38: mod_base = OTHER; note = 2'-O-methyl adenosine
  modified_base 39: mod_base = OTHER; note = 2'-O-methyl guanosine
  modified_base 40: mod_base = OTHER; note = 2'-O-methyl cytidine
  modified_base 69: mod_base = OTHER; note = 2'-O-methyl adenosine
  modified_base 70: mod_base = OTHER; note = 2'-O-methyl cytidine
  modified_base 71: mod_base = OTHER; note = 2'-O-methyl uridine
  modified_base 72: mod_base = OTHER; note = 2'-O-methyl uridine
  modified_base 73: mod_base = OTHER; note = 2'-O-methyl guanosine
  modified_base 74: mod_base = OTHER; note = 2'-O-methyl adenosine
  modified_base 75: mod_base = OTHER; note = 2'-O-methyl adenosine
  modified_base 76: mod_base = OTHER; note = 2'-O-methyl adenosine
  modified_base 77: mod_base = OTHER; note = 2'-O-methyl adenosine
  modified_base 78: mod_base = OTHER; note = 2'-O-methyl adenosine
  modified_base 79: mod_base = OTHER; note = 2'-O-methyl guanosine
  modified_base 80: mod_base = OTHER; note = 2'-O-methyl uridine
  modified_base 81: mod_base = OTHER; note = 2'-O-methyl guanosine
  modified_base 82: mod_base = OTHER; note = 2'-O-methyl guanosine
  modified_base 83: mod_base = OTHER; note = 2'-O-methyl cytidine
  modified_base 84: mod_base = OTHER; note = 2'-O-methyl adenosine
  modified_base 85: mod_base = OTHER; note = 2'-O-methyl cytidine
  modified_base 86: mod_base = OTHER; note = 2'-O-methyl cytidine
  modified_base 87: mod_base = OTHER; note = 2'-O-methyl guanosine
  modified_base 88: mod_base = OTHER; note = 2'-O-methyl adenosine
  modified_base 89: mod_base = OTHER; note = 2'-O-methyl guanosine
  modified_base 90: mod_base = OTHER; note = 2'-O-methyl uridine
  modified_base 91: mod_base = OTHER; note = 2'-O-methyl cytidine
  modified_base 92: mod_base = OTHER; note = 2'-O-methyl guanosine
  modified_base 93: mod_base = OTHER; note = 2'-O-methyl guanosine
  modified_base 94: mod_base = OTHER; note = 2'-O-methyl uridine
  modified_base 95: mod_base = OTHER; note = 2'-O-methyl guanosine
  modified_base 96: mod_base = OTHER; note = 2'-O-methyl cytidine
  modified_base 97: mod_base = OTHER; note = 2'-O-methyl uridine phosphorothioate
  modified_base 98: mod_base = OTHER; note = 2'-O-methyl uridine phosphorothioate
  modified_base 99: mod_base = OTHER; note = 2'-O-methyl uridine phosphorothioate
  modified_base 100: mod_base = OTHER; note = 2'-O-methyl uridine
acacaaataccagtccagcggttttagagctagaaatagcaagttaaaataaggctagtccgttatcaacttgaaaaagtggcaccgagtcggtgctttt

SEQ ID NO: 20630 - RNA, 20 nt, synthetic construct
  source 1..20: mol_type = other RNA
acacaaataccagtccagcg

SEQ ID NO: 20631 - RNA, 6369 nt, synthetic construct; identical to SEQ ID NO: 20628
  source 1..6369: mol_type = other RNA

SEQ ID NO: 20632 - RNA, 100 nt, synthetic construct; identical to SEQ ID NO: 20629
  source 1..100: mol_type = other RNA
  modified_base 1: mod_base = OTHER; note = 2'-O-methyl adenosine phosphorothioate
  modified_base 2: mod_base = OTHER; note = 2'-O-methyl cytidine phosphorothioate
  modified_base 3: mod_base = OTHER; note = 2'-O-methyl adenosine phosphorothioate
  modified_base 29: mod_base = OTHER; note = 2'-O-methyl guanosine
  modified_base 30: mod_base = OTHER; note = 2'-O-methyl cytidine
  modified_base 31: mod_base = OTHER; note = 2'-O-methyl uridine
  modified_base 32: mod_base = OTHER; note = 2'-O-methyl adenosine
  modified_base 33: mod_base = OTHER; note = 2'-O-methyl guanosine
  modified_base 34: mod_base = OTHER; note = 2'-O-methyl adenosine
  modified_base 35: mod_base = OTHER; note = 2'-O-methyl adenosine
  modified_base 36: mod_base = OTHER; note = 2'-O-methyl adenosine
  modified_base 37: mod_base = OTHER; note = 2'-O-methyl uridine
  modified_base 38: mod_base = OTHER; note = 2'-O-methyl adenosine
  modified_base 39: mod_base = OTHER; note = 2'-O-methyl guanosine
  modified_base 40: mod_base = OTHER; note = 2'-O-methyl cytidine
  modified_base 69: mod_base = OTHER; note = 2'-O-methyl adenosine
  modified_base 70: mod_base = OTHER; note = 2'-O-methyl cytidine
  modified_base 71: mod_base = OTHER; note = 2'-O-methyl uridine
  modified_base 72: mod_base = OTHER; note = 2'-O-methyl uridine
  modified_base 73: mod_base = OTHER; note = 2'-O-methyl guanosine
  modified_base 74: mod_base = OTHER; note = 2'-O-methyl adenosine
  modified_base 75: mod_base = OTHER; note = 2'-O-methyl adenosine
  modified_base 76: mod_base = OTHER; note = 2'-O-methyl adenosine
  modified_base 77: mod_base = OTHER; note = 2'-O-methyl adenosine
  modified_base 78: mod_base = OTHER; note = 2'-O-methyl adenosine
  modified_base 79: mod_base = OTHER; note = 2'-O-methyl guanosine
  modified_base 80: mod_base = OTHER; note = 2'-O-methyl uridine
  modified_base 81: mod_base = OTHER; note = 2'-O-methyl guanosine
  modified_base 82: mod_base = OTHER; note = 2'-O-methyl guanosine
  modified_base 83: mod_base = OTHER; note = 2'-O-methyl cytidine
  modified_base 84: mod_base = OTHER; note = 2'-O-methyl adenosine
  modified_base 85: mod_base = OTHER; note = 2'-O-methyl cytidine
  modified_base 86: mod_base = OTHER; note = 2'-O-methyl cytidine
  modified_base 87: mod_base = OTHER; note = 2'-O-methyl guanosine
  modified_base 88: mod_base = OTHER; note = 2'-O-methyl adenosine
  modified_base 89: mod_base = OTHER; note = 2'-O-methyl guanosine
  modified_base 90: mod_base = OTHER; note = 2'-O-methyl uridine
  modified_base 91: mod_base = OTHER; note = 2'-O-methyl cytidine
  modified_base 92: mod_base = OTHER; note = 2'-O-methyl guanosine
  modified_base 93: mod_base = OTHER; note = 2'-O-methyl guanosine
  modified_base 94: mod_base = OTHER; note = 2'-O-methyl uridine
  modified_base 95: mod_base = OTHER; note = 2'-O-methyl guanosine
  modified_base 96: mod_base = OTHER; note = 2'-O-methyl cytidine
  modified_base 97: mod_base = OTHER; note = 2'-O-methyl uridine phosphorothioate
  modified_base 98: mod_base = OTHER; note = 2'-O-methyl uridine phosphorothioate
  modified_base 99: mod_base = OTHER; note = 2'-O-methyl uridine phosphorothioate
  modified_base 100: mod_base = OTHER; note = 2'-O-methyl uridine

SEQ ID NO: 20633 - DNA, 494 bp, synthetic construct
  source 1..494: mol_type = other DNA
atggtgcatctgactcctgaggagaagtctgccgttactgccctgtggggcaaggtgaacgtggatgaagttggtggtgaggccctgggcaggctgctggtggtctacccttggacccagaggttctttgagtcctttggggatctgtccactcctgatgctgttatgggcaaccctaaggtgaaggctcatggcaagaaagtgctcggtgcctttagtgatggcctggctcacctggacaacctcaagggcacctttgccacactgagtgagctgcactgtgacaagctgcacgtggatcctgagaacttcaggctcctgggcaacgtgctggtctgtgtgctggcccatcactttggcaaagaattcaccccaccagtgcaggctgcctatcagaaagtggtggctggtgtggctaatgccctggcccacaagtatcactaagctcgctttcttgctgtccaatttctattaaaggttcctttgttccctaa

SEQ ID NO: 20634 - RNA, 121 nt, synthetic construct
  source 1..121: mol_type = other RNA
  modified_base 1: mod_base = OTHER; note = 2'-O-methyl guanosine phosphorothioate
  modified_base 2: mod_base = OTHER; note = 2'-O-methyl uridine phosphorothioate
  modified_base 3: mod_base = OTHER; note = 2'-O-methyl adenosine phosphorothioate
  modified_base 118: mod_base = OTHER; note = cytidine phosphorothioate
  modified_base 119: mod_base = OTHER; note = 2'-O-methyl uridine phosphorothioate
  modified_base 120: mod_base = OTHER; note = 2'-O-methyl guanosine phosphorothioate
  modified_base 121: mod_base = OTHER; note = 2'-O-methyl cytidine
gtaacggcagacttctcctcgttttagagctagaaatagcaagttaaaataaggctagtccgttatcaacttgaaaaagtggcaccgagtcggtgcacctgactcctgcggagaagtctgc

SEQ ID NO: 20635 - RNA, 122 nt, synthetic construct
  source 1..122: mol_type = other RNA
  modified_base 1: mod_base = OTHER; note = 2'-O-methyl guanosine phosphorothioate
  modified_base 2: mod_base = OTHER; note = 2'-O-methyl uridine phosphorothioate
  modified_base 3: mod_base = OTHER; note = 2'-O-methyl adenosine phosphorothioate
  modified_base 119: mod_base = OTHER; note = uridine phosphorothioate
  modified_base 120: mod_base = OTHER; note = 2'-O-methyl guanosine phosphorothioate
  modified_base 121: mod_base = OTHER; note = 2'-O-methyl cytidine phosphorothioate
  modified_base 122: mod_base = OTHER; note = 2'-O-methyl cytidine
gtaacggcagacttctcctcgttttagagctagaaatagcaagttaaaataaggctagtccgttatcaacttgaaaaagtggcaccgagtcggtgcacctgactcctgcggagaagtctgcc

SEQ ID NO: 20636 - RNA, 123 nt, synthetic construct
  source 1..123: mol_type = other RNA
  modified_base 1: mod_base = OTHER; note = 2'-O-methyl guanosine phosphorothioate
  modified_base 2: mod_base = OTHER; note = 2'-O-methyl uridine phosphorothioate
  modified_base 3: mod_base = OTHER; note = 2'-O-methyl adenosine phosphorothioate
  modified_base 120: mod_base = OTHER; note = cytidine phosphorothioate
  modified_base 121: mod_base = OTHER; note = 2'-O-methyl uridine phosphorothioate
  modified_base 122: mod_base = OTHER; note = 2'-O-methyl guanosine phosphorothioate
  modified_base 123: mod_base = OTHER; note = 2'-O-methyl cytidine
gtaacggcagacttctcctcgttttagagctagaaatagcaagttaaaataaggctagtccgttatcaacttgaaaaagtggcaccgagtcggtgcgcacctgactcctgcggagaagtctgc

SEQ ID NO: 20637 - RNA, 133 nt, synthetic construct
  source 1..133: mol_type = other RNA
  modified_base 1: mod_base = OTHER; note = 2'-O-methyl cytidine phosphorothioate
  modified_base 2: mod_base = OTHER; note = 2'-O-methyl adenosine phosphorothioate
  modified_base 3: mod_base = OTHER; note = 2'-O-methyl uridine phosphorothioate
  modified_base 130: mod_base = OTHER; note = cytidine phosphorothioate
  modified_base 131: mod_base = OTHER; note = 2'-O-methyl adenosine phosphorothioate
  modified_base 132: mod_base = OTHER; note = 2'-O-methyl uridine phosphorothioate
  modified_base 133: mod_base = OTHER; note = 2'-O-methyl guanosine
catggtgcacctgactcctggttttagagctagaaatagcaagttaaaataaggctagtccgttatcaacttgaaaaagtggcaccgagtcggtgcaacggcagacttctctacaggagtcaggtgcaccatg

SEQ ID NO: 20638 - RNA, 132 nt, synthetic construct
  source 1..132: mol_type = other RNA
  modified_base 1: mod_base = OTHER; note = 2'-O-methyl cytidine phosphorothioate
  modified_base 2: mod_base = OTHER; note = 2'-O-methyl adenosine phosphorothioate
  modified_base 3: mod_base = OTHER; note = 2'-O-methyl uridine phosphorothioate
  modified_base 129: mod_base = OTHER; note = cytidine phosphorothioate
  modified_base 130: mod_base = OTHER; note = 2'-O-methyl cytidine phosphorothioate
  modified_base 131: mod_base = OTHER; note = 2'-O-methyl adenosine phosphorothioate
  modified_base 132: mod_base = OTHER; note = 2'-O-methyl uridine
catggtgcacctgactcctggttttagagctagaaatagcaagttaaaataaggctagtccgttatcaacttgaaaaagtggcaccgagtcggtgcaacggcagacttctctacaggagtcaggtgcaccat

SEQ ID NO: 20639 - RNA, 131 nt, synthetic construct
  source 1..131: mol_type = other RNA
  modified_base 1: mod_base = OTHER; note = 2'-O-methyl cytidine phosphorothioate
  modified_base 2: mod_base = OTHER; note = 2'-O-methyl adenosine phosphorothioate
  modified_base 3: mod_base = OTHER; note = 2'-O-methyl uridine phosphorothioate
  modified_base 128: mod_base = OTHER; note = adenosine phosphorothioate
  modified_base 129: mod_base = OTHER; note = 2'-O-methyl cytidine phosphorothioate
  modified_base 130: mod_base = OTHER; note = 2'-O-methyl cytidine phosphorothioate
  modified_base 131: mod_base = OTHER; note = 2'-O-methyl adenosine
catggtgcacctgactcctggttttagagctagaaatagcaagttaaaataaggctagtccgttatcaacttgaaaaagtggcaccgagtcggtgcaacggcagacttctctacaggagtcaggtgcacca

SEQ ID NO: 20640 - RNA, 130 nt, synthetic construct
  source 1..130: mol_type = other RNA
  modified_base 1: mod_base = OTHER; note = 2'-O-methyl cytidine phosphorothioate
  modified_base 2: mod_base = OTHER; note = 2'-O-methyl adenosine phosphorothioate
  modified_base 3: mod_base = OTHER; note = 2'-O-methyl uridine phosphorothioate
  modified_base 127: mod_base = OTHER; note = cytidine phosphorothioate
  modified_base 128: mod_base = OTHER; note = 2'-O-methyl adenosine phosphorothioate
  modified_base 129: mod_base = OTHER; note = 2'-O-methyl cytidine phosphorothioate
  modified_base 130: mod_base = OTHER; note = 2'-O-methyl cytidine
catggtgcacctgactcctggttttagagctagaaatagcaagttaaaataaggctagtccgttatcaacttgaaaaagtggcaccgagtcggtgcaacggcagacttctctacaggagtcaggtgcacc

SEQ ID NO: 20641 - RNA, 129 nt, synthetic construct
  source 1..129: mol_type = other RNA
  modified_base 1: mod_base = OTHER; note = 2'-O-methyl cytidine phosphorothioate
  modified_base 2: mod_base = OTHER; note = 2'-O-methyl adenosine phosphorothioate
  modified_base 3: mod_base = OTHER; note = 2'-O-methyl uridine phosphorothioate
  modified_base 126: mod_base = OTHER; note = guanosine phosphorothioate
  modified_base 127: mod_base = OTHER; note = 2'-O-methyl cytidine phosphorothioate
  modified_base 128: mod_base = OTHER; note = 2'-O-methyl adenosine phosphorothioate
  modified_base 129: mod_base = OTHER; note = 2'-O-methyl cytidine
catggtgcacctgactcctggttttagagctagaaatagcaagttaaaataaggctagtccgttatcaacttgaaaaagtggcaccgagtcggtgcaacggcagacttctctacaggagtcaggtgcac

SEQ ID NO: 20642 - RNA, 128 nt, synthetic construct
  source 1..128: mol_type = other RNA
  modified_base 1: mod_base = OTHER; note = 2'-O-methyl cytidine phosphorothioate
  modified_base 2: mod_base = OTHER; note = 2'-O-methyl adenosine phosphorothioate
  modified_base 3: mod_base = OTHER; note = 2'-O-methyl uridine phosphorothioate
  modified_base 125: mod_base = OTHER; note = uridine phosphorothioate
  modified_base 126: mod_base = OTHER; note = 2'-O-methyl guanosine phosphorothioate
  modified_base 127: mod_base = OTHER; note = 2'-O-methyl cytidine phosphorothioate
  modified_base 128: mod_base = OTHER; note = 2'-O-methyl adenosine
catggtgcacctgactcctggttttagagctagaaatagcaagttaaaataaggctagtccgttatcaacttgaaaaagtggcaccgagtcggtgcaacggcagacttctctacaggagtcaggtgca

SEQ ID NO: 20643 - RNA, 127 nt, synthetic construct
  source 1..127: mol_type = other RNA
  modified_base 1: mod_base = OTHER; note = 2'-O-methyl cytidine phosphorothioate
  modified_base 2: mod_base = OTHER; note = 2'-O-methyl adenosine phosphorothioate
  modified_base 3: mod_base = OTHER; note = 2'-O-methyl uridine phosphorothioate
  modified_base 124: mod_base = OTHER; note = guanosine phosphorothioate
  modified_base 125: mod_base = OTHER; note = 2'-O-methyl uridine phosphorothioate
  modified_base 126: mod_base = OTHER; note = 2'-O-methyl guanosine phosphorothioate
  modified_base 127: mod_base = OTHER; note = 2'-O-methyl cytidine
catggtgcacctgactcctggttttagagctagaaatagcaagttaaaataaggctagtccgttatcaacttgaaaaagtggcaccgagtcggtgcaacggcagacttctctacaggagtcaggtgc

SEQ ID NO: 20644 - RNA, 126 nt, synthetic construct
  source 1..126: mol_type = other RNA
  modified_base 1: mod_base = OTHER; note = 2'-O-methyl cytidine phosphorothioate
  modified_base 2: mod_base = OTHER; note = 2'-O-methyl adenosine phosphorothioate
  modified_base 3: mod_base = OTHER; note = 2'-O-methyl uridine phosphorothioate
  modified_base 123: mod_base = OTHER; note = guanosine phosphorothioate
  modified_base 124: mod_base = OTHER; note = 2'-O-methyl guanosine phosphorothioate
  modified_base 125: mod_base = OTHER; note = 2'-O-methyl uridine phosphorothioate
  modified_base 126: mod_base = OTHER; note = 2'-O-methyl guanosine
catggtgcacctgactcctggttttagagctagaaatagcaagttaaaataaggctagtccgttatcaacttgaaaaagtggcaccgagtcggtgcaacggcagacttctctacaggagtcaggtg

SEQ ID NO: 20645 - RNA, 125 nt, synthetic construct
  source 1..125: mol_type = other RNA
  modified_base 1: mod_base = OTHER; note = 2'-O-methyl cytidine phosphorothioate
  modified_base 2: mod_base = OTHER; note = 2'-O-methyl adenosine phosphorothioate
  modified_base 3: mod_base = OTHER; note = 2'-O-methyl uridine phosphorothioate
  modified_base 122: mod_base = OTHER; note = adenosine phosphorothioate
  modified_base 123: mod_base = OTHER; note = 2'-O-methyl guanosine phosphorothioate
  modified_base 124: mod_base = OTHER; note = 2'-O-methyl guanosine phosphorothioate
  modified_base 125: mod_base = OTHER; note = 2'-O-methyl uridine
catggtgcacctgactcctggttttagagctagaaatagcaagttaaaataaggctagtccgttatcaacttgaaaaagtggcaccgagtcggtgcaacggcagacttctctacaggagtcaggt

SEQ ID NO: 20646 - RNA, 124 nt, synthetic construct
  source 1..124: mol_type = other RNA
  modified_base 1: mod_base = OTHER; note = 2'-O-methyl cytidine phosphorothioate
  modified_base 2: mod_base = OTHER; note = 2'-O-methyl adenosine phosphorothioate
  modified_base 3: mod_base = OTHER; note = 2'-O-methyl uridine phosphorothioate
  modified_base 121: mod_base = OTHER; note = cytidine phosphorothioate
  modified_base 122: mod_base = OTHER; note = 2'-O-methyl adenosine phosphorothioate
  modified_base 123: mod_base = OTHER; note = 2'-O-methyl guanosine phosphorothioate
  modified_base 124: mod_base = OTHER; note = 2'-O-methyl guanosine
catggtgcacctgactcctggttttagagctagaaatagcaagttaaaataaggctagtccgttatcaacttgaaaaagtggcaccgagtcggtgcaacggcagacttctctacaggagtcagg

SEQ ID NO: 20647 - RNA, 132 nt, synthetic construct
  source 1..132: mol_type = other RNA
  modified_base 1: mod_base = OTHER; note = 2'-O-methyl cytidine phosphorothioate
  modified_base 2: mod_base = OTHER; note = 2'-O-methyl adenosine phosphorothioate
  modified_base 3: mod_base = OTHER; note = 2'-O-methyl uridine phosphorothioate
  modified_base 129: mod_base = OTHER; note = cytidine phosphorothioate
  modified_base 130: mod_base = OTHER; note = 2'-O-methyl adenosine phosphorothioate
  modified_base 131: mod_base = OTHER; note = 2'-O-methyl uridine phosphorothioate
  modified_base 132: mod_base = OTHER; note = 2'-O-methyl guanosine
catggtgcacctgactcctggttttagagctagaaatagcaagttaaaataaggctagtccgttatcaacttgaaaaagtggcaccgagtcggtgcacggcagacttctctacaggagtcaggtgcaccatg

SEQ ID NO: 20648 - RNA, 131 nt, synthetic construct
  source 1..131: mol_type = other RNA
  modified_base 1: mod_base = OTHER; note = 2'-O-methyl cytidine phosphorothioate
  modified_base 2: mod_base = OTHER; note = 2'-O-methyl adenosine phosphorothioate
  modified_base 3: mod_base = OTHER; note = 2'-O-methyl uridine phosphorothioate
  modified_base 128: mod_base = OTHER; note = cytidine phosphorothioate
  modified_base 129: mod_base = OTHER; note = 2'-O-methyl cytidine phosphorothioate
  modified_base 130: mod_base = OTHER; note = 2'-O-methyl adenosine phosphorothioate
  modified_base 131: mod_base = OTHER; note = 2'-O-methyl uridine
catggtgcacctgactcctggttttagagctagaaatagcaagttaaaataaggctagtccgttatcaacttgaaaaagtggcaccgagtcggtgcacggcagacttctctacaggagtcaggtgcaccat

SEQ ID NO: 20649 - RNA, 130 nt, synthetic construct
  source 1..130: mol_type = other RNA
  modified_base 1: mod_base = OTHER; note = 2'-O-methyl cytidine phosphorothioate
  modified_base 2: mod_base = OTHER; note = 2'-O-methyl adenosine phosphorothioate
  modified_base 3: mod_base = OTHER; note = 2'-O-methyl uridine phosphorothioate
  modified_base 127: mod_base = OTHER; note = adenosine phosphorothioate
  modified_base 128: mod_base = OTHER; note = 2'-O-methyl cytidine phosphorothioate
  modified_base 129: mod_base = OTHER; note = 2'-O-methyl cytidine phosphorothioate
  modified_base 130: mod_base = OTHER; note = 2'-O-methyl adenosine
catggtgcacctgactcctggttttagagctagaaatagcaagttaaaataaggctagtccgttatcaacttgaaaaagtggcaccgagtcggtgcacggcagacttctctacaggagtcaggtgcacca

SEQ ID NO: 20650 - RNA, 129 nt, synthetic construct
  source 1..129: mol_type = other RNA
  modified_base 1: mod_base = OTHER; note = 2'-O-methyl cytidine phosphorothioate
  modified_base 2: mod_base = OTHER; note = 2'-O-methyl adenosine phosphorothioate
  modified_base 3: mod_base = OTHER; note = 2'-O-methyl uridine phosphorothioate
  modified_base 126: mod_base = OTHER; note = cytidine phosphorothioate
  modified_base 127: mod_base = OTHER; note = 2'-O-methyl adenosine phosphorothioate
  modified_base 128: mod_base = OTHER; note = 2'-O-methyl cytidine phosphorothioate
  modified_base 129: mod_base = OTHER; note = 2'-O-methyl cytidine
catggtgcacctgactcctggttttagagctagaaatagcaagttaaaataaggctagtccgttatcaacttgaaaaagtggcaccgagtcggtgcacggcagacttctctacaggagtcaggtgcacc

SEQ ID NO: 20651 - RNA, 128 nt, synthetic construct
  source 1..128: mol_type = other RNA
  modified_base 1: mod_base = OTHER; note = 2'-O-methyl cytidine phosphorothioate
  modified_base 2: mod_base = OTHER; note = 2'-O-methyl adenosine phosphorothioate
  modified_base 3: mod_base = OTHER; note = 2'-O-methyl uridine phosphorothioate
  modified_base 125: mod_base = OTHER; note = guanosine phosphorothioate
  modified_base 126: mod_base = OTHER; note = 2'-O-methyl cytidine phosphorothioate
  modified_base 127: mod_base = OTHER; note = 2'-O-methyl adenosine phosphorothioate
  modified_base 128: mod_base = OTHER; note = 2'-O-methyl cytidine
catggtgcacctgactcctggttttagagctagaaatagcaagttaaaataaggctagtccgttatcaacttgaaaaagtggcaccgagtcggtgcacggcagacttctctacaggagtcaggtgcac

SEQ ID NO: 20652 - RNA, 127 nt, synthetic construct
  source 1..127: mol_type = other RNA
  modified_base 1: mod_base = OTHER; note = 2'-O-methyl cytidine phosphorothioate
  modified_base 2: mod_base = OTHER; note = 2'-O-methyl adenosine phosphorothioate
  modified_base 3: mod_base = OTHER; note = 2'-O-methyl uridine phosphorothioate
  modified_base 124: mod_base = OTHER; note = uridine phosphorothioate
  modified_base 125: mod_base = OTHER; note = 2'-O-methyl guanosine phosphorothioate
  modified_base 126: mod_base = OTHER; note = 2'-O-methyl cytidine phosphorothioate
  modified_base 127: mod_base = OTHER; note = 2'-O-methyl adenosine
catggtgcacctgactcctggttttagagctagaaatagcaagttaaaataaggctagtccgttatcaacttgaaaaagtggcaccgagtcggtgcacggcagacttctctacaggagtcaggtgca

SEQ ID NO: 20653 - RNA, 126 nt, synthetic construct
  source 1..126: mol_type = other RNA
  modified_base 1: mod_base = OTHER; note = 2'-O-methyl cytidine phosphorothioate
  modified_base 2: mod_base = OTHER; note = 2'-O-methyl adenosine phosphorothioate
  modified_base 3: mod_base = OTHER; note = 2'-O-methyl uridine phosphorothioate
  modified_base 123: mod_base = OTHER; note = guanosine phosphorothioate
  modified_base 124: mod_base = OTHER; note = 2'-O-methyl uridine phosphorothioate
  modified_base 125: mod_base = OTHER; note = 2'-O-methyl guanosine phosphorothioate
  modified_base 126: mod_base = OTHER; note = 2'-O-methyl cytidine
catggtgcacctgactcctggttttagagctagaaatagcaagttaaaataaggctagtccgttatcaacttgaaaaagtggcaccgagtcggtgcacggcagacttctctacaggagtcaggtgc

SEQ ID NO: 20654 - RNA, 125 nt, synthetic construct
  source 1..125: mol_type = other RNA
  modified_base 1: mod_base = OTHER; note = 2'-O-methyl cytidine phosphorothioate
  modified_base 2: mod_base = OTHER; note = 2'-O-methyl adenosine phosphorothioate
  modified_base 3: mod_base = OTHER; note = 2'-O-methyl uridine phosphorothioate
  modified_base 122: mod_base = OTHER; note = guanosine phosphorothioate
  modified_base 123: mod_base = OTHER; note = 2'-O-methyl guanosine phosphorothioate
  modified_base 124: mod_base = OTHER; note = 2'-O-methyl uridine phosphorothioate
  modified_base 125: mod_base = OTHER; note = 2'-O-methyl guanosine
catggtgcacctgactcctggttttagagctagaaatagcaagttaaaataaggctagtccgttatcaacttgaaaaagtggcaccgagtcggtgcacggcagacttctctacaggagtcaggtg

SEQ ID NO: 20655 - RNA, 124 nt, synthetic construct
  source 1..124: mol_type = other RNA
  modified_base 1: mod_base = OTHER; note = 2'-O-methyl cytidine phosphorothioate
  modified_base 2: mod_base = OTHER; note = 2'-O-methyl adenosine phosphorothioate
  modified_base 3: mod_base = OTHER; note = 2'-O-methyl uridine phosphorothioate
  modified_base 121: mod_base = OTHER; note = adenosine phosphorothioate
  modified_base 122: mod_base = OTHER; note = 2'-O-methyl guanosine phosphorothioate
  modified_base 123: mod_base = OTHER; note = 2'-O-methyl guanosine phosphorothioate
  modified_base 124: mod_base = OTHER; note = 2'-O-methyl uridine
catggtgcacctgactcctggttttagagctagaaatagcaagttaaaataaggctagtccgttatcaacttgaaaaagtggcaccgagtcggtgcacggcagacttctctacaggagtcaggt

SEQ ID NO: 20656 - RNA, 123 nt, synthetic construct
  source 1..123: mol_type = other RNA
  modified_base 1: mod_base = OTHER; note = 2'-O-methyl cytidine phosphorothioate
  modified_base 2: mod_base = OTHER; note = 2'-O-methyl adenosine phosphorothioate
  modified_base 3: mod_base = OTHER; note = 2'-O-methyl uridine phosphorothioate
  modified_base 120: mod_base = OTHER; note = cytidine phosphorothioate
  modified_base 121: mod_base = OTHER; note = 2'-O-methyl adenosine phosphorothioate
  modified_base 122: mod_base = OTHER; note = 2'-O-methyl guanosine phosphorothioate
  modified_base 123: mod_base = OTHER; note = 2'-O-methyl guanosine
catggtgcacctgactcctggttttagagctagaaatagcaagttaaaataaggctagtccgttatcaacttgaaaaagtggcaccgagtcggtgcacggcagacttctctacaggagtcagg

SEQ ID NO: 20657 - RNA, 130 nt, synthetic construct
  source 1..130: mol_type = other RNA
  modified_base 1: mod_base = OTHER; note = 2'-O-methyl cytidine phosphorothioate
  modified_base 2: mod_base = OTHER; note = 2'-O-methyl adenosine phosphorothioate
  modified_base 3: mod_base = OTHER; note = 2'-O-methyl uridine phosphorothioate
  modified_base 127: mod_base = OTHER; note = cytidine phosphorothioate
  modified_base 128: mod_base = OTHER; note = 2'-O-methyl adenosine phosphorothioate
  modified_base 129: mod_base = OTHER; note = 2'-O-methyl uridine phosphorothioate
  modified_base 130: mod_base = OTHER; note = 2'-O-methyl guanosine
catggtgcacctgactcctggttttagagctagaaatagcaagttaaaataaggctagtccgttatcaacttgaaaaagtggcaccgagtcggtgcggcagacttctctacaggagtcaggtgcaccatg

SEQ ID NO: 20658 - RNA, 129 nt, synthetic construct
  source 1..129: mol_type = other RNA
  modified_base 1: mod_base = OTHER; note = 2'-O-methyl cytidine phosphorothioate
  modified_base 2: mod_base = OTHER; note = 2'-O-methyl adenosine phosphorothioate
  modified_base 3: mod_base = OTHER; note = 2'-O-methyl uridine phosphorothioate
  modified_base 126: mod_base = OTHER; note = cytidine phosphorothioate
  modified_base 127: mod_base = OTHER; note = 2'-O-methyl cytidine phosphorothioate
  modified_base 128: mod_base = OTHER; note = 2'-O-methyl adenosine phosphorothioate
  modified_base 129: mod_base = OTHER; note = 2'-O-methyl uridine
catggtgcacctgactcctggttttagagctagaaatagcaagttaaaataaggctagtccgttatcaacttgaaaaagtggcaccgagtcggtgcggcagacttctctacaggagtcaggtgcaccat

SEQ ID NO: 20659 - RNA, 128 nt, synthetic construct
  source 1..128: mol_type = other RNA
  modified_base 1: mod_base = OTHER; note = 2'-O-methyl cytidine phosphorothioate
  modified_base 2: mod_base = OTHER; note = 2'-O-methyl adenosine phosphorothioate
  modified_base 3: mod_base = OTHER; note = 2'-O-methyl uridine phosphorothioate
  modified_base 125: mod_base = OTHER; note = adenosine phosphorothioate
  modified_base 126: mod_base = OTHER; note = 2'-O-methyl cytidine phosphorothioate
  modified_base 127: mod_base = OTHER; note = 2'-O-methyl cytidine phosphorothioate
  modified_base 128: mod_base = OTHER; note = 2'-O-methyl adenosine
catggtgcacctgactcctggttttagagctagaaatagcaagttaaaataaggctagtccgttatcaacttgaaaaagtggcaccgagtcggtgcggcagacttctctacaggagtcaggtgcacca

SEQ ID NO: 20660 - RNA, 127 nt, synthetic construct
  source 1..127: mol_type = other RNA
  modified_base 1: mod_base = OTHER; note = 2'-O-methyl cytidine phosphorothioate
  modified_base 2: mod_base = OTHER; note = 2'-O-methyl adenosine phosphorothioate
  modified_base 3: mod_base = OTHER; note = 2'-O-methyl uridine phosphorothioate
  modified_base 124: mod_base = OTHER; note = cytidine phosphorothioate
  modified_base 125: mod_base = OTHER; note = 2'-O-methyl adenosine phosphorothioate
  modified_base 126: mod_base = OTHER; note = 2'-O-methyl cytidine phosphorothioate
  modified_base 127: mod_base = OTHER; note = 2'-O-methyl cytidine
catggtgcacctgactcctggttttagagctagaaatagcaagttaaaataaggctagtccgttatcaacttgaaaaagtggcaccgagtcggtgcggcagacttctctacaggagtcaggtgcacc

SEQ ID NO: 20661 - RNA, 126 nt, synthetic construct
  source 1..126: mol_type = other RNA
  modified_base 1: mod_base = OTHER; note = 2'-O-methyl cytidine phosphorothioate
  modified_base 2: mod_base = OTHER; note = 2'-O-methyl adenosine phosphorothioate
  modified_base 3: mod_base = OTHER; note = 2'-O-methyl uridine phosphorothioate
  modified_base 123: mod_base = OTHER; note = guanosine phosphorothioate
  modified_base 124: mod_base = OTHER; note = 2'-O-methyl cytidine phosphorothioate
  modified_base 125: mod_base = OTHER; note = 2'-O-methyl adenosine phosphorothioate
  modified_base 126: mod_base = OTHER; note = 2'-O-methyl cytidine
catggtgcacctgactcctggttttagagctagaaatagcaagttaaaataaggctagtccgttatcaacttgaaaaagtggcaccgagtcggtgcggcagacttctctacaggagtcaggtgcac

SEQ ID NO: 20662 - RNA, 125 nt, synthetic construct
  source 1..125: mol_type = other RNA
  modified_base 1: mod_base = OTHER; note = 2'-O-methyl cytidine phosphorothioate
  modified_base 2: mod_base = OTHER; note = 2'-O-methyl adenosine phosphorothioate
  modified_base 3: mod_base = OTHER; note = 2'-O-methyl uridine phosphorothioate
  modified_base 122: mod_base = OTHER; note = uridine phosphorothioate
  modified_base 123: mod_base = OTHER; note = 2'-O-methyl guanosine phosphorothioate
  modified_base 124: mod_base = OTHER; note = 2'-O-methyl cytidine phosphorothioate
  modified_base 125: mod_base = OTHER; note = 2'-O-methyl adenosine
catggtgcacctgactcctggttttagagctagaaatagcaagttaaaataaggctagtccgttatcaacttgaaaaagtggcaccgagtcggtgcggcagacttctctacaggagtcaggtgca

SEQ ID NO: 20663 - RNA, 124 nt, synthetic construct
  source 1..124: mol_type = other RNA
  modified_base 1: mod_base = OTHER; note = 2'-O-methyl cytidine phosphorothioate
  modified_base 2: mod_base = OTHER; note = 2'-O-methyl adenosine phosphorothioate
  modified_base 3: mod_base = OTHER; note = 2'-O-methyl uridine phosphorothioate
  modified_base 121: mod_base = OTHER; note = guanosine phosphorothioate
  modified_base 122: mod_base = OTHER; note = 2'-O-methyl uridine phosphorothioate
  modified_base 123: mod_base = OTHER; note = 2'-O-methyl guanosine phosphorothioate
  modified_base 124: mod_base = OTHER; note = 2'-O-methyl cytidine
catggtgcacctgactcctggttttagagctagaaatagcaagttaaaataaggctagtccgttatcaacttgaaaaagtggcaccgagtcggtgcggcagacttctctacaggagtcaggtgc

SEQ ID NO: 20664 - RNA, 123 nt, synthetic construct
  source 1..123: mol_type = other RNA
  modified_base 1: mod_base = OTHER; note = 2'-O-methyl cytidine phosphorothioate
  modified_base 2: mod_base = OTHER; note = 2'-O-methyl adenosine phosphorothioate
  modified_base 3: mod_base = OTHER; note = 2'-O-methyl uridine phosphorothioate
  modified_base 120: mod_base = OTHER; note = guanosine phosphorothioate
  modified_base 121: mod_base = OTHER; note = 2'-O-methyl guanosine phosphorothioate
  modified_base 122: mod_base = OTHER; note = 2'-O-methyl uridine phosphorothioate
  modified_base 123: mod_base = OTHER; note = 2'-O-methyl guanosine
catggtgcacctgactcctggttttagagctagaaatagcaagttaaaataaggctagtccgttatcaacttgaaaaagtggcaccgagtcggtgcggcagacttctctacaggagtcaggtg

SEQ ID NO: 20665 - RNA, 122 nt, synthetic construct
  source 1..122: mol_type = other RNA
  modified_base 1: mod_base = OTHER; note = 2'-O-methyl cytidine phosphorothioate
  modified_base 2: mod_base = OTHER; note = 2'-O-methyl adenosine phosphorothioate
  modified_base 3: mod_base = OTHER; note = 2'-O-methyl uridine phosphorothioate
  modified_base 119: mod_base = OTHER; note = adenosine phosphorothioate
  modified_base 120: mod_base = OTHER; note = 2'-O-methyl guanosine phosphorothioate
  modified_base 121: mod_base = OTHER; note = 2'-O-methyl guanosine phosphorothioate
  modified_base 122: mod_base = OTHER; note = 2'-O-methyl uridine
catggtgcacctgactcctggttttagagctagaaatagcaagttaaaataaggctagtccgttatcaacttgaaaaagtggcaccgagtcggtgcggcagacttctctacaggagtcaggt

SEQ ID NO: 20666 - RNA, 121 nt, synthetic construct
  source 1..121: mol_type = other RNA
  modified_base 1: mod_base = OTHER; note = 2'-O-methyl cytidine phosphorothioate
  modified_base 2: mod_base = OTHER; note = 2'-O-methyl adenosine phosphorothioate
  modified_base 3: mod_base = OTHER; note = 2'-O-methyl uridine phosphorothioate
  modified_base 118: mod_base = OTHER; note = cytidine phosphorothioate
  modified_base 119: mod_base = OTHER; note = 2'-O-methyl adenosine phosphorothioate
  modified_base 120: mod_base = OTHER; note = 2'-O-methyl guanosine phosphorothioate
  modified_base 121: mod_base = OTHER; note = 2'-O-methyl guanosine
catggtgcacctgactcctggttttagagctagaaatagcaagttaaaataaggctagtccgttatcaacttgaaaaagtggcaccgagtcggtgcggcagacttctctacaggagtcagg

SEQ ID NO: 20667 - RNA, 129 nt, synthetic construct
  source 1..129: mol_type = other RNA
  modified_base 1: mod_base = OTHER; note = 2'-O-methyl cytidine phosphorothioate
  modified_base 2: mod_base = OTHER; note = 2'-O-methyl adenosine phosphorothioate
  modified_base 3: mod_base = OTHER; note = 2'-O-methyl uridine phosphorothioate
  modified_base 126: mod_base = OTHER; note = cytidine phosphorothioate
  modified_base 127: mod_base = OTHER; note = 2'-O-methyl adenosine phosphorothioate
  modified_base 128: mod_base = OTHER; note = 2'-O-methyl uridine phosphorothioate
  modified_base 129: mod_base = OTHER; note = 2'-O-methyl guanosine
catggtgcacctgactcctggttttagagctagaaatagcaagttaaaataaggctagtccgttatcaacttgaaaaagtggcaccgagtcggtgcgcagacttctctacaggagtcaggtgcaccatg

SEQ ID NO: 20668 - RNA, 128 nt, synthetic construct
  source 1..128: mol_type = other RNA
  modified_base 1: mod_base = OTHER; note = 2'-O-methyl cytidine phosphorothioate
  modified_base 2: mod_base = OTHER; note = 2'-O-methyl adenosine phosphorothioate
  modified_base 3: mod_base = OTHER; note = 2'-O-methyl uridine phosphorothioate
  modified_base 125: mod_base = OTHER; note = cytidine phosphorothioate
  modified_base 126: mod_base = OTHER; note = 2'-O-methyl cytidine phosphorothioate
  modified_base 127: mod_base = OTHER; note = 2'-O-methyl adenosine phosphorothioate
  modified_base 128: mod_base = OTHER; note = 2'-O-methyl uridine
catggtgcacctgactcctggttttagagctagaaatagcaagttaaaataaggctagtccgttatcaacttgaaaaagtggcaccgagtcggtgcgcagacttctctacaggagtcaggtgcaccat

SEQ ID NO: 20669 - RNA, 127 nt, synthetic construct
  source 1..127: mol_type = other RNA
  modified_base 1: mod_base = OTHER; note = 2'-O-methyl cytidine phosphorothioate
  modified_base 2: mod_base = OTHER; note = 2'-O-methyl adenosine phosphorothioate
  modified_base 3: mod_base = OTHER; note = 2'-O-methyl uridine phosphorothioate
  modified_base 124: mod_base = OTHER; note = adenosine phosphorothioate
  modified_base 125: mod_base = OTHER; note = 2'-O-methyl cytidine phosphorothioate
  modified_base 126: mod_base = OTHER; note = 2'-O-methyl cytidine phosphorothioate
  modified_base 127: mod_base = OTHER; note = 2'-O-methyl adenosine
catggtgcacctgactcctggttttagagctagaaatagcaagttaaaataaggctagtccgttatcaacttgaaaaagtggcaccgagtcggtgcgcagacttctctacaggagtcaggtgcacca

SEQ ID NO: 20670 - RNA, 126 nt, synthetic construct
  source 1..126: mol_type = other RNA
  modified_base 1: mod_base = OTHER; note = 2'-O-methyl cytidine phosphorothioate
  modified_base 2: mod_base = OTHER; note = 2'-O-methyl adenosine phosphorothioate
  modified_base 3: mod_base = OTHER; note = 2'-O-methyl uridine phosphorothioate
  modified_base 123: mod_base = OTHER; note = cytidine phosphorothioate
  modified_base 124: mod_base = OTHER; note = 2'-O-methyl adenosine phosphorothioate
  modified_base 125: mod_base = OTHER; note = 2'-O-methyl cytidine phosphorothioate
  modified_base 126: mod_base = OTHER; note = 2'-O-methyl cytidine
catggtgcacctgactcctggttttagagctagaaatagcaagttaaaataaggctagtccgttatcaacttgaaaaagtggcaccgagtcggtgcgcagacttctctacaggagtcaggtgcacc

SEQ ID NO: 20671 - RNA, 125 nt, synthetic construct
  source 1..125: mol_type = other RNA
  modified_base 1: mod_base = OTHER; note = 2'-O-methyl cytidine phosphorothioate
  modified_base 2: mod_base = OTHER; note = 2'-O-methyl adenosine phosphorothioate
  modified_base 3: mod_base = OTHER; note = 2'-O-methyl uridine phosphorothioate
  modified_base 122: mod_base = OTHER; note = guanosine phosphorothioate
  modified_base 123: mod_base = OTHER; note = 2'-O-methyl cytidine phosphorothioate
  modified_base 124: mod_base = OTHER; note = 2'-O-methyl adenosine phosphorothioate
  modified_base 125: mod_base = OTHER; note = 2'-O-methyl cytidine
catggtgcacctgactcctggttttagagctagaaatagcaagttaaaataaggctagtccgttatcaacttgaaaaagtggcaccgagtcggtgcgcagacttctctacaggagtcaggtgcac

SEQ ID NO: 20672 - RNA, 124 nt, synthetic construct
  source 1..124: mol_type = other RNA
  modified_base 1: mod_base = OTHER; note = 2'-O-methyl cytidine phosphorothioate
  modified_base 2: mod_base = OTHER; note = 2'-O-methyl adenosine phosphorothioate
  modified_base 3: mod_base = OTHER; note = 2'-O-methyl uridine phosphorothioate
  modified_base 121: mod_base = OTHER; note = uridine phosphorothioate
  modified_base 122: mod_base = OTHER; note = 2'-O-methyl guanosine phosphorothioate
  modified_base 123: mod_base = OTHER; note = 2'-O-methyl cytidine phosphorothioate
  modified_base 124: mod_base = OTHER; note = 2'-O-methyl adenosine
catggtgcacctgactcctggttttagagctagaaatagcaagttaaaataaggctagtccgttatcaacttgaaaaagtggcaccgagtcggtgcgcagacttctctacaggagtcaggtgca

SEQ ID NO: 20673 - RNA, 123 nt, synthetic construct
  source 1..123: mol_type = other RNA
  modified_base 1: mod_base = OTHER; note = 2'-O-methyl cytidine phosphorothioate
  modified_base 2: mod_base = OTHER; note = 2'-O-methyl adenosine phosphorothioate
  modified_base 3: mod_base = OTHER; note = 2'-O-methyl uridine phosphorothioate
  modified_base 120: mod_base = OTHER; note = guanosine phosphorothioate
  modified_base 121: mod_base = OTHER; note = 2'-O-methyl uridine phosphorothioate
  modified_base 122: mod_base = OTHER; note = 2'-O-methyl guanosine phosphorothioate
  modified_base 123: mod_base = OTHER; note = 2'-O-methyl cytidine
catggtgcacctgactcctggttttagagctagaaatagcaagttaaaataaggctagtccgttatcaacttgaaaaagtggcaccgagtcggtgcgcagacttctctacaggagtcaggtgc

SEQ ID NO: 20674 - RNA, 122 nt, synthetic construct
  source 1..122: mol_type = other RNA
  modified_base 1: mod_base = OTHER; note = 2'-O-methyl cytidine phosphorothioate
  modified_base 2: mod_base = OTHER; note = 2'-O-methyl adenosine phosphorothioate
  modified_base 3: mod_base = OTHER; note = 2'-O-methyl uridine phosphorothioate
  modified_base 119: mod_base = OTHER; note = guanosine phosphorothioate
  modified_base 120: mod_base = OTHER; note = 2'-O-methyl guanosine phosphorothioate
  modified_base 121: mod_base = OTHER; note = 2'-O-methyl uridine phosphorothioate
  modified_base 122: mod_base = OTHER; note = 2'-O-methyl guanosine
catggtgcacctgactcctggttttagagctagaaatagcaagttaaaataaggctagtccgttatcaacttgaaaaagtggcaccgagtcggtgcgcagacttctctacaggagtcaggtg

SEQ ID NO: 20675 - RNA, 121 nt, synthetic construct
  source 1..121: mol_type = other RNA
  modified_base 1: mod_base = OTHER; note = 2'-O-methyl cytidine phosphorothioate
  modified_base 2: mod_base = OTHER; note = 2'-O-methyl adenosine phosphorothioate
  modified_base 3: mod_base = OTHER; note = 2'-O-methyl uridine phosphorothioate
  modified_base 118: mod_base = OTHER; note = adenosine phosphorothioate
  modified_base 119: mod_base = OTHER; note = 2'-O-methyl guanosine phosphorothioate
  modified_base 120: mod_base = OTHER; note = 2'-O-methyl guanosine phosphorothioate
  modified_base 121: mod_base = OTHER; note = 2'-O-methyl uridine
catggtgcacctgactcctggttttagagctagaaatagcaagttaaaataaggctagtccgttatcaacttgaaaaagtggcaccgagtcggtgcgcagacttctctacaggagtcaggt

SEQ ID NO: 20676 - RNA, 120 nt, synthetic construct
  source 1..120: mol_type = other RNA
  modified_base 1: mod_base = OTHER; note = 2'-O-methyl cytidine phosphorothioate
  modified_base 2: mod_base = OTHER; note = 2'-O-methyl adenosine phosphorothioate
  modified_base 3: mod_base = OTHER; note = 2'-O-methyl uridine phosphorothioate
  modified_base 117: mod_base = OTHER; note = cytidine phosphorothioate
  modified_base 118: mod_base = OTHER; note = 2'-O-methyl adenosine phosphorothioate
  modified_base 119: mod_base = OTHER; note = 2'-O-methyl guanosine phosphorothioate
  modified_base 120: mod_base = OTHER; note = 2'-O-methyl guanosine
catggtgcacctgactcctggttttagagctagaaatagcaagttaaaataaggctagtccgttatcaacttgaaaaagtggcaccgagtcggtgcgcagacttctctacaggagtcagg

SEQ ID NO: 20677 - RNA, 127 nt, synthetic construct
  source 1..127: mol_type = other RNA
  modified_base 1: mod_base = OTHER; note = 2'-O-methyl cytidine phosphorothioate
  modified_base 2: mod_base = OTHER; note = 2'-O-methyl adenosine phosphorothioate
  modified_base 3: mod_base = OTHER; note = 2'-O-methyl uridine phosphorothioate
  modified_base 124: mod_base = OTHER; note = cytidine phosphorothioate
  modified_base 125: mod_base = OTHER; note = 2'-O-methyl adenosine phosphorothioate
  modified_base 126: mod_base = OTHER; note = 2'-O-methyl uridine phosphorothioate
  modified_base 127: mod_base = OTHER; note = 2'-O-methyl guanosine
catggtgcacctgactcctggttttagagctagaaatagcaagttaaaataaggctagtccgttatcaacttgaaaaagtggcaccgagtcggtgcagacttctctacaggagtcaggtgcaccatg

SEQ ID NO: 20678 - RNA, 126 nt, synthetic construct
  source 1..126: mol_type = other RNA
  modified_base 1: mod_base = OTHER; note = 2'-O-methyl cytidine phosphorothioate
  modified_base 2: mod_base = OTHER; note = 2'-O-methyl adenosine phosphorothioate
  modified_base 3: mod_base = OTHER; note = 2'-O-methyl uridine phosphorothioate
  modified_base 123: mod_base = OTHER; note = cytidine phosphorothioate
  modified_base 124: mod_base = OTHER; note = 2'-O-methyl cytidine phosphorothioate
  modified_base 125: mod_base = OTHER; note = 2'-O-methyl adenosine phosphorothioate
  modified_base 126: mod_base = OTHER; note = 2'-O-methyl uridine
catggtgcacctgactcctggttttagagctagaaatagcaagttaaaataaggctagtccgttatcaacttgaaaaagtggcaccgagtcggtgcagacttctctacaggagtcaggtgcaccat

SEQ ID NO: 20679 - RNA, 125 nt, synthetic construct
  source 1..125: mol_type = other RNA
  modified_base 1: mod_base = OTHER; note = 2'-O-methyl cytidine phosphorothioate
  modified_base 2: mod_base = OTHER; note = 2'-O-methyl adenosine phosphorothioate
  modified_base 3: mod_base = OTHER; note = 2'-O-methyl uridine phosphorothioate
  modified_base 122: mod_base = OTHER; note = adenosine phosphorothioate
  modified_base 123: mod_base = OTHER; note = 2'-O-methyl cytidine phosphorothioate
  modified_base 124: mod_base = OTHER; note = 2'-O-methyl cytidine phosphorothioate
  modified_base 125: mod_base = OTHER; note = 2'-O-methyl adenosine
catggtgcacctgactcctggttttagagctagaaatagcaagttaaaataaggctagtccgttatcaacttgaaaaagtggcaccgagtcggtgcagacttctctacaggagtcaggtgcacca

SEQ ID NO: 20680 - RNA, 124 nt, synthetic construct
  source 1..124: mol_type = other RNA
  modified_base 1: mod_base = OTHER; note = 2'-O-methyl cytidine phosphorothioate
  modified_base 2: mod_base = OTHER; note = 2'-O-methyl adenosine phosphorothioate
  modified_base 3: mod_base = OTHER; note = 2'-O-methyl uridine phosphorothioate
  modified_base 121: mod_base = OTHER; note = cytidine phosphorothioate
  modified_base 122: mod_base = OTHER; note = 2'-O-methyl adenosine phosphorothioate
  modified_base 123: mod_base = OTHER; note = 2'-O-methyl cytidine phosphorothioate
  modified_base 124: mod_base = OTHER; note = 2'-O-methyl cytidine
catggtgcacctgactcctggttttagagctagaaatagcaagttaaaataaggctagtccgttatcaacttgaaaaagtggcaccgagtcggtgcagacttctctacaggagtcaggtgcacc

SEQ ID NO: 20681 - RNA, 123 nt, synthetic construct
  source 1..123: mol_type = other RNA
  modified_base 1: mod_base = OTHER; note = 2'-O-methyl cytidine phosphorothioate
  modified_base 2: mod_base = OTHER; note = 2'-O-methyl adenosine phosphorothioate
  modified_base 3: mod_base = OTHER; note = 2'-O-methyl uridine phosphorothioate
  modified_base 120: mod_base = OTHER; note = guanosine phosphorothioate
  modified_base 121: mod_base = OTHER; note = 2'-O-methyl cytidine phosphorothioate
  modified_base 122: mod_base = OTHER; note = 2'-O-methyl adenosine phosphorothioate
  modified_base 123: mod_base = OTHER; note = 2'-O-methyl cytidine
catggtgcacctgactcctggttttagagctagaaatagcaagttaaaataaggctagtccgttatcaacttgaaaaagtggcaccgagtcggtgcagacttctctacaggagtcaggtgcac

SEQ ID NO: 20682 - RNA, 122 nt, synthetic construct
  source 1..122: mol_type = other RNA
  modified_base 1: mod_base = OTHER; note = 2'-O-methyl cytidine phosphorothioate
  modified_base 2: mod_base = OTHER; note = 2'-O-methyl adenosine phosphorothioate
  modified_base 3: mod_base = OTHER; note = 2'-O-methyl uridine phosphorothioate
  modified_base 119: mod_base = OTHER; note = uridine phosphorothioate
  modified_base 120: mod_base = OTHER; note = 2'-O-methyl guanosine phosphorothioate
  modified_base 121: mod_base = OTHER; note = 2'-O-methyl cytidine phosphorothioate
  modified_base 122: mod_base = OTHER; note = 2'-O-methyl adenosine
catggtgcacctgactcctggttttagagctagaaatagcaagttaaaataaggctagtccgttatcaacttgaaaaagtggcaccgagtcggtgcagacttctctacaggagtcaggtgca

SEQ ID NO: 20683 - RNA, 121 nt, synthetic construct
  source 1..121: mol_type = other RNA
  modified_base 1: mod_base = OTHER; note = 2'-O-methyl cytidine phosphorothioate
  modified_base 2: mod_base = OTHER; note = 2'-O-methyl adenosine phosphorothioate
  modified_base 3: mod_base = OTHER; note = 2'-O-methyl uridine phosphorothioate
  modified_base 118: mod_base = OTHER; note = guanosine phosphorothioate
  modified_base 119: mod_base = OTHER; note = 2'-O-methyl uridine phosphorothioate
  modified_base 120: mod_base = OTHER; note = 2'-O-methyl guanosine phosphorothioate
  modified_base 121: mod_base = OTHER; note = 2'-O-methyl cytidine
catggtgcacctgactcctggttttagagctagaaatagcaagttaaaataaggctagtccgttatcaacttgaaaaagtggcaccgagtcggtgcagacttctctacaggagtcaggtgc

SEQ ID NO: 20684 - RNA, 120 nt, synthetic construct
  source 1..120: mol_type = other RNA
  modified_base 1: mod_base = OTHER; note = 2'-O-methyl cytidine phosphorothioate
  modified_base 2: mod_base = OTHER; note = 2'-O-methyl adenosine phosphorothioate
  modified_base 3: mod_base = OTHER; note = 2'-O-methyl uridine phosphorothioate
  modified_base 117: mod_base = OTHER; note = guanosine phosphorothioate
  modified_base 118: mod_base = OTHER; note = 2'-O-methyl guanosine phosphorothioate
  modified_base 119: mod_base = OTHER; note = 2'-O-methyl uridine phosphorothioate
  modified_base 120: mod_base = OTHER; note = 2'-O-methyl guanosine
catggtgcacctgactcctggttttagagctagaaatagcaagttaaaataaggctagtccgttatcaacttgaaaaagtggcaccgagtcggtgcagacttctctacaggagtcaggtg

SEQ ID NO: 20685 - RNA, 119 nt, synthetic construct
  source 1..119: mol_type = other RNA
  modified_base 1: mod_base = OTHER; note = 2'-O-methyl cytidine phosphorothioate
  modified_base 2: mod_base = OTHER; note = 2'-O-methyl adenosine phosphorothioate
  modified_base 3: mod_base = OTHER; note = 2'-O-methyl uridine phosphorothioate
  modified_base 116: mod_base = OTHER; note = adenosine phosphorothioate
  modified_base 117: mod_base = OTHER; note = 2'-O-methyl guanosine phosphorothioate
  modified_base 118: mod_base = OTHER; note = 2'-O-methyl guanosine phosphorothioate
  modified_base 119: mod_base = OTHER; note = 2'-O-methyl uridine
catggtgcacctgactcctggttttagagctagaaatagcaagttaaaataaggctagtccgttatcaacttgaaaaagtggcaccgagtcggtgcagacttctctacaggagtcaggt

SEQ ID NO: 20686 - RNA, 118 nt, synthetic construct
  source 1..118: mol_type = other RNA
  modified_base 1: mod_base = OTHER; note = 2'-O-methyl cytidine phosphorothioate
  modified_base 2: mod_base = OTHER; note = 2'-O-methyl adenosine phosphorothioate
  modified_base 3: mod_base = OTHER; note = 2'-O-methyl uridine phosphorothioate
  modified_base 115: mod_base = OTHER; note = cytidine phosphorothioate
  modified_base 116: mod_base = OTHER; note = 2'-O-methyl adenosine phosphorothioate
  modified_base 117: mod_base = OTHER; note = 2'-O-methyl guanosine phosphorothioate
  modified_base 118: mod_base = OTHER; note = 2'-O-methyl guanosine
catggtgcacctgactcctggttttagagctagaaatagcaagttaaaataaggctagtccgttatcaacttgaaaaagtggcaccgagtcggtgcagacttctctacaggagtcagg

SEQ ID NO: 20687 - RNA, 126 nt, synthetic construct
  source 1..126: mol_type = other RNA
  modified_base 1: mod_base = OTHER; note = 2'-O-methyl cytidine phosphorothioate
  modified_base 2: mod_base = OTHER; note = 2'-O-methyl adenosine phosphorothioate
  modified_base 3: mod_base = OTHER; note = 2'-O-methyl uridine phosphorothioate
  modified_base 123: mod_base = OTHER; note = cytidine phosphorothioate
  modified_base 124: mod_base = OTHER; note = 2'-O-methyl adenosine phosphorothioate
  modified_base 125: mod_base = OTHER; note = 2'-O-methyl uridine phosphorothioate
  modified_base 126: mod_base = OTHER; note = 2'-O-methyl guanosine
catggtgcacctgactcctggttttagagctagaaatagcaagttaaaataaggctagtccgttatcaacttgaaaaagtggcaccgagtcggtgcgacttctctacaggagtcaggtgcaccatg

SEQ ID NO: 20688 - RNA, 125 nt, synthetic construct
  source 1..125: mol_type = other RNA
  modified_base 1: mod_base = OTHER; note = 2'-O-methyl cytidine phosphorothioate
  modified_base 2: mod_base = OTHER; note = 2'-O-methyl adenosine phosphorothioate
  modified_base 3: mod_base = OTHER; note = 2'-O-methyl uridine phosphorothioate
  modified_base 122: mod_base = OTHER; note = cytidine phosphorothioate
  modified_base 123: mod_base = OTHER; note = 2'-O-methyl cytidine phosphorothioate
  modified_base 124: mod_base = OTHER; note = 2'-O-methyl adenosine phosphorothioate
  modified_base 125: mod_base = OTHER; note = 2'-O-methyl uridine
catggtgcacctgactcctggttttagagctagaaatagcaagttaaaataaggctagtccgttatcaacttgaaaaagtggcaccgagtcggtgcgacttctctacaggagtcaggtgcaccat

SEQ ID NO: 20689 - RNA, 124 nt, synthetic construct
  source 1..124: mol_type = other RNA
  modified_base 1: mod_base = OTHER; note = 2'-O-methyl cytidine phosphorothioate
  modified_base 2: mod_base = OTHER; note = 2'-O-methyl adenosine phosphorothioate
  modified_base 3: mod_base = OTHER; note = 2'-O-methyl uridine phosphorothioate
  modified_base 121: mod_base = OTHER; note = adenosine phosphorothioate
  modified_base 122: mod_base = OTHER; note = 2'-O-methyl cytidine phosphorothioate
  modified_base 123: mod_base = OTHER; note = 2'-O-methyl cytidine phosphorothioate
  modified_base 124: mod_base = OTHER; note = 2'-O-methyl adenosine
catggtgcacctgactcctggttttagagctagaaatagcaagttaaaataaggctagtccgttatcaacttgaaaaagtggcaccgagtcggtgcgacttctctacaggagtcaggtgcacca

SEQ ID NO: 20690 - RNA, 123 nt, synthetic construct
  source 1..123: mol_type = other RNA
  modified_base 1: mod_base = OTHER; note = 2'-O-methyl cytidine phosphorothioate
  modified_base 2: mod_base = OTHER; note = 2'-O-methyl adenosine phosphorothioate
  modified_base 3: mod_base = OTHER; note = 2'-O-methyl uridine phosphorothioate
  modified_base 120: mod_base = OTHER; note = cytidine phosphorothioate
  modified_base 121: mod_base = OTHER; note = 2'-O-methyl adenosine phosphorothioate
  modified_base 122: mod_base = OTHER; note = 2'-O-methyl cytidine phosphorothioate
  modified_base 123: mod_base = OTHER; note = 2'-O-methyl cytidine
catggtgcacctgactcctggttttagagctagaaatagcaagttaaaataaggctagtccgttatcaacttgaaaaagtggcaccgagtcggtgcgacttctctacaggagtcaggtgcacc

SEQ ID NO: 20691 - RNA, 122 nt, synthetic construct
  source 1..122: mol_type = other RNA
  modified_base 1: mod_base = OTHER; note = 2'-O-methyl cytidine phosphorothioate
  modified_base 2: mod_base = OTHER; note = 2'-O-methyl adenosine phosphorothioate
  modified_base 3: mod_base = OTHER; note = 2'-O-methyl uridine phosphorothioate
  modified_base 119: mod_base = OTHER; note = guanosine phosphorothioate
  modified_base 120: mod_base = OTHER; note = 2'-O-methyl cytidine phosphorothioate
  modified_base 121: mod_base = OTHER; note = 2'-O-methyl adenosine phosphorothioate
  modified_base 122: mod_base = OTHER; note = 2'-O-methyl cytidine
catggtgcacctgactcctggttttagagctagaaatagcaagttaaaataaggctagtccgttatcaacttgaaaaagtggcaccgagtcggtgcgacttctctacaggagtcaggtgcac

SEQ ID NO: 20692 - RNA, 121 nt, synthetic construct
  source 1..121: mol_type = other RNA
  modified_base 1: mod_base = OTHER; note = 2'-O-methyl cytidine phosphorothioate
  modified_base 2: mod_base = OTHER; note = 2'-O-methyl adenosine phosphorothioate
  modified_base 3: mod_base = OTHER; note = 2'-O-methyl uridine phosphorothioate
  modified_base 118: mod_base = OTHER; note = uridine phosphorothioate
  modified_base 119: mod_base = OTHER; note = 2'-O-methyl guanosine phosphorothioate
  modified_base 120: mod_base = OTHER; note = 2'-O-methyl cytidine phosphorothioate
  modified_base 121: mod_base = OTHER; note = 2'-O-methyl adenosine
catggtgcacctgactcctggttttagagctagaaatagcaagttaaaataaggctagtccgttatcaacttgaaaaagtggcaccgagtcggtgcgacttctctacaggagtcaggtgca

SEQ ID NO: 20693 - RNA, 120 nt, synthetic construct
  source 1..120: mol_type = other RNA
  modified_base 1: mod_base = OTHER; note = 2'-O-methyl cytidine phosphorothioate
  modified_base 2: mod_base = OTHER; note = 2'-O-methyl adenosine phosphorothioate
  modified_base 3: mod_base = OTHER; note = 2'-O-methyl uridine phosphorothioate
  modified_base 117: mod_base = OTHER; note = guanosine phosphorothioate
  modified_base 118: mod_base = OTHER; note = 2'-O-methyl uridine phosphorothioate
  modified_base 119: mod_base = OTHER; note = 2'-O-methyl guanosine phosphorothioate
  modified_base 120: mod_base = OTHER; note = 2'-O-methyl cytidine
catggtgcacctgactcctggttttagagctagaaatagcaagttaaaataaggctagtccgttatcaacttgaaaaagtggcaccgagtcggtgcgacttctctacaggagtcaggtgc

SEQ ID NO: 20694 - RNA, 119 nt, synthetic construct
  source 1..119: mol_type = other RNA
  modified_base 1: mod_base = OTHER; note = 2'-O-methyl cytidine phosphorothioate
  modified_base 2: mod_base = OTHER; note = 2'-O-methyl adenosine phosphorothioate
  modified_base 3: mod_base = OTHER; note = 2'-O-methyl uridine phosphorothioate
  modified_base 116: mod_base = OTHER; note = guanosine phosphorothioate
  modified_base 117: mod_base = OTHER; note = 2'-O-methyl guanosine phosphorothioate
  modified_base 118: mod_base = OTHER; note = 2'-O-methyl uridine phosphorothioate
  modified_base 119: mod_base = OTHER; note = 2'-O-methyl guanosine
catggtgcacctgactcctggttttagagctagaaatagcaagttaaaataaggctagtccgttatcaacttgaaaaagtggcaccgagtcggtgcgacttctctacaggagtcaggtg

SEQ ID NO: 20695 - RNA, 118 nt, synthetic construct
  source 1..118: mol_type = other RNA
  modified_base 1: mod_base = OTHER; note = 2'-O-methyl cytidine phosphorothioate
  modified_base 2: mod_base = OTHER; note = 2'-O-methyl adenosine phosphorothioate
  modified_base 3: mod_base = OTHER; note = 2'-O-methyl uridine phosphorothioate
  modified_base 115: mod_base = OTHER; note = adenosine phosphorothioate
  modified_base 116: mod_base = OTHER; note = 2'-O-methyl guanosine phosphorothioate
  modified_base 117: mod_base = OTHER; note = 2'-O-methyl guanosine phosphorothioate
  modified_base 118: mod_base = OTHER; note = 2'-O-methyl uridine
catggtgcacctgactcctggttttagagctagaaatagcaagttaaaataaggctagtccgttatcaacttgaaaaagtggcaccgagtcggtgcgacttctctacaggagtcaggt

SEQ ID NO: 20696 - RNA, 117 nt, synthetic construct
  source 1..117: mol_type = other RNA
  modified_base 1: mod_base = OTHER; note = 2'-O-methyl cytidine phosphorothioate
  modified_base 2: mod_base = OTHER; note = 2'-O-methyl adenosine phosphorothioate
  modified_base 3: mod_base = OTHER; note = 2'-O-methyl uridine phosphorothioate
  modified_base 114: mod_base = OTHER; note = cytidine phosphorothioate
  modified_base 115: mod_base = OTHER; note = 2'-O-methyl adenosine phosphorothioate
  modified_base 116: mod_base = OTHER; note = 2'-O-methyl guanosine phosphorothioate
  modified_base 117: mod_base = OTHER; note = 2'-O-methyl guanosine
catggtgcacctgactcctggttttagagctagaaatagcaagttaaaataaggctagtccgttatcaacttgaaaaagtggcaccgagtcggtgcgacttctctacaggagtcagg

SEQ ID NO: 20697 - RNA, 125 nt, synthetic construct
  source 1..125: mol_type = other RNA
  modified_base 1: mod_base = OTHER; note = 2'-O-methyl cytidine phosphorothioate
  modified_base 2: mod_base = OTHER; note = 2'-O-methyl adenosine phosphorothioate
  modified_base 3: mod_base = OTHER; note = 2'-O-methyl uridine phosphorothioate
  modified_base 122: mod_base = OTHER; note = cytidine phosphorothioate
  modified_base 123: mod_base = OTHER; note = 2'-O-methyl adenosine phosphorothioate
  modified_base 124: mod_base = OTHER; note = 2'-O-methyl uridine phosphorothioate
  modified_base 125: mod_base = OTHER; note = 2'-O-methyl guanosine
catggtgcacctgactcctggttttagagctagaaatagcaagttaaaataaggctagtccgttatcaacttgaaaaagtggcaccgagtcggtgcacttctctacaggagtcaggtgcaccatg

SEQ ID NO: 20698 - RNA, 124 nt, synthetic construct
  source 1..124: mol_type = other RNA
  modified_base 1: mod_base = OTHER; note = 2'-O-methyl cytidine phosphorothioate
  modified_base 2: mod_base = OTHER; note = 2'-O-methyl adenosine phosphorothioate
  modified_base 3: mod_base = OTHER; note = 2'-O-methyl uridine phosphorothioate
  modified_base 121: mod_base = OTHER; note = cytidine phosphorothioate
  modified_base 122: mod_base = OTHER; note = 2'-O-methyl cytidine phosphorothioate
  modified_base 123: mod_base = OTHER; note = 2'-O-methyl adenosine phosphorothioate
  modified_base 124: mod_base = OTHER; note = 2'-O-methyl uridine
catggtgcacctgactcctggttttagagctagaaatagcaagttaaaataaggctagtccgttatcaacttgaaaaagtggcaccgagtcggtgcacttctctacaggagtcaggtgcaccat

SEQ ID NO: 20699 - RNA, 123 nt, synthetic construct
  source 1..123: mol_type = other RNA
  modified_base 1: mod_base = OTHER; note = 2'-O-methyl cytidine phosphorothioate
  modified_base 2: mod_base = OTHER; note = 2'-O-methyl adenosine phosphorothioate
  modified_base 3: mod_base = OTHER; note = 2'-O-methyl uridine phosphorothioate
  modified_base 120: mod_base = OTHER; note = adenosine phosphorothioate
  modified_base 121: mod_base = OTHER; note = 2'-O-methyl cytidine phosphorothioate
  modified_base 122: mod_base = OTHER; note = 2'-O-methyl cytidine phosphorothioate
  modified_base 123: mod_base = OTHER; note = 2'-O-methyl adenosine
catggtgcacctgactcctggttttagagctagaaatagcaagttaaaataaggctagtccgttatcaacttgaaaaagtggcaccgagtcggtgcacttctctacaggagtcaggtgcacca

SEQ ID NO: 20700 - RNA, 122 nt, synthetic construct
  source 1..122: mol_type = other RNA
  modified_base 1: mod_base = OTHER; note = 2'-O-methyl cytidine phosphorothioate
  modified_base 2: mod_base = OTHER; note = 2'-O-methyl adenosine phosphorothioate
  modified_base 3: mod_base = OTHER; note = 2'-O-methyl uridine phosphorothioate
  modified_base 119: mod_base = OTHER; note = cytidine phosphorothioate
  modified_base 120: mod_base = OTHER; note = 2'-O-methyl adenosine phosphorothioate
  modified_base 121: mod_base = OTHER; note = 2'-O-methyl cytidine phosphorothioate
  modified_base 122: mod_base = OTHER; note = 2'-O-methyl cytidine
catggtgcacctgactcctggttttagagctagaaatagcaagttaaaataaggctagtccgttatcaacttgaaaaagtggcaccgagtcggtgcacttctctacaggagtcaggtgcacc

SEQ ID NO: 20701 - RNA, 121 nt, synthetic construct
  source 1..121: mol_type = other RNA
  modified_base 1: mod_base = OTHER; note = 2'-O-methyl cytidine phosphorothioate
  modified_base 2: mod_base = OTHER; note = 2'-O-methyl adenosine phosphorothioate
  modified_base 3: mod_base = OTHER; note = 2'-O-methyl uridine phosphorothioate
  modified_base 118: mod_base = OTHER; note = guanosine phosphorothioate
  modified_base 119: mod_base = OTHER; note = 2'-O-methyl cytidine phosphorothioate
  modified_base 120: mod_base = OTHER; note = 2'-O-methyl adenosine phosphorothioate
  modified_base 121: mod_base = OTHER; note = 2'-O-methyl cytidine
catggtgcacctgactcctggttttagagctagaaatagcaagttaaaataaggctagtccgttatcaacttgaaaaagtggcaccgagtcggtgcacttctctacaggagtcaggtgcac

SEQ ID NO: 20702 - RNA, 120 nt, synthetic construct
  source 1..120: mol_type = other RNA
  modified_base 1: mod_base = OTHER; note = 2'-O-methyl cytidine phosphorothioate
  modified_base 2: mod_base = OTHER; note = 2'-O-methyl adenosine phosphorothioate
  modified_base 3: mod_base = OTHER; note = 2'-O-methyl uridine phosphorothioate
  modified_base 117: mod_base = OTHER; note = uridine phosphorothioate
  modified_base 118: mod_base = OTHER; note = 2'-O-methyl guanosine phosphorothioate
  modified_base 119: mod_base = OTHER; note = 2'-O-methyl cytidine phosphorothioate
  modified_base 120: mod_base = OTHER; note = 2'-O-methyl adenosine
catggtgcacctgactcctggttttagagctagaaatagcaagttaaaataaggctagtccgttatcaacttgaaaaagtggcaccgagtcggtgcacttctctacaggagtcaggtgca

SEQ ID NO: 20703 - RNA, 119 nt, synthetic construct
  source 1..119: mol_type = other RNA
  modified_base 1: mod_base = OTHER; note = 2'-O-methyl cytidine phosphorothioate
  modified_base 2: mod_base = OTHER; note = 2'-O-methyl adenosine phosphorothioate
  modified_base 3: mod_base = OTHER; note = 2'-O-methyl uridine phosphorothioate
  modified_base 116: mod_base = OTHER; note = guanosine phosphorothioate
  modified_base 117: mod_base = OTHER; note = 2'-O-methyl uridine phosphorothioate
  modified_base 118: mod_base = OTHER; note = 2'-O-methyl guanosine phosphorothioate
  modified_base 119: mod_base = OTHER; note = 2'-O-methyl cytidine
catggtgcacctgactcctggttttagagctagaaatagcaagttaaaataaggctagtccgttatcaacttgaaaaagtggcaccgagtcggtgcacttctctacaggagtcaggtgc

SEQ ID NO: 20704 - RNA, 118 nt, synthetic construct
  source 1..118: mol_type = other RNA
  modified_base 1: mod_base = OTHER; note = 2'-O-methyl cytidine phosphorothioate
  modified_base 2: mod_base = OTHER; note = 2'-O-methyl adenosine phosphorothioate
  modified_base 3: mod_base = OTHER; note = 2'-O-methyl uridine phosphorothioate
  modified_base 115: mod_base = OTHER; note = guanosine phosphorothioate
  modified_base 116: mod_base = OTHER; note = 2'-O-methyl guanosine phosphorothioate
  modified_base 117: mod_base = OTHER; note = 2'-O-methyl uridine phosphorothioate
  modified_base 118: mod_base = OTHER; note = 2'-O-methyl guanosine
catggtgcacctgactcctggttttagagctagaaatagcaagttaaaataaggctagtccgttatcaacttgaaaaagtggcaccgagtcggtgcacttctctacaggagtcaggtg

SEQ ID NO: 20705 - RNA, 117 nt, synthetic construct
  source 1..117: mol_type = other RNA
  modified_base 1: mod_base = OTHER; note = 2'-O-methyl cytidine phosphorothioate
  modified_base 2: mod_base = OTHER; note = 2'-O-methyl adenosine phosphorothioate
  modified_base 3: mod_base = OTHER; note = 2'-O-methyl uridine phosphorothioate
  modified_base 114: mod_base = OTHER; note = adenosine phosphorothioate
  modified_base 115: mod_base = OTHER; note = 2'-O-methyl guanosine phosphorothioate
  modified_base 116: mod_base = OTHER; note = 2'-O-methyl guanosine phosphorothioate
  modified_base 117: mod_base = OTHER; note = 2'-O-methyl uridine
catggtgcacctgactcctggttttagagctagaaatagcaagttaaaataaggctagtccgttatcaacttgaaaaagtggcaccgagtcggtgcacttctctacaggagtcaggt

SEQ ID NO: 20706 - RNA, 116 nt, synthetic construct
  source 1..116: mol_type = other RNA
  modified_base 1: mod_base = OTHER; note = 2'-O-methyl cytidine phosphorothioate
  modified_base 2: mod_base = OTHER; note = 2'-O-methyl adenosine phosphorothioate
  modified_base 3: mod_base = OTHER; note = 2'-O-methyl uridine phosphorothioate
  modified_base 113: mod_base = OTHER; note = cytidine phosphorothioate
  modified_base 114: mod_base = OTHER; note = 2'-O-methyl adenosine phosphorothioate
  modified_base 115: mod_base = OTHER; note = 2'-O-methyl guanosine phosphorothioate
  modified_base 116: mod_base = OTHER; note = 2'-O-methyl guanosine
catggtgcacctgactcctggttttagagctagaaatagcaagttaaaataaggctagtccgttatcaacttgaaaaagtggcaccgagtcggtgcacttctctacaggagtcagg

SEQ ID NO: 20707 - RNA, 123 nt, synthetic construct
  source 1..123: mol_type = other RNA
  modified_base 1: mod_base = OTHER; note = 2'-O-methyl cytidine phosphorothioate
  modified_base 2: mod_base = OTHER; note = 2'-O-methyl adenosine phosphorothioate
  modified_base 3: mod_base = OTHER; note = 2'-O-methyl uridine phosphorothioate
  modified_base 120: mod_base = OTHER; note = cytidine phosphorothioate
  modified_base 121: mod_base = OTHER; note = 2'-O-methyl adenosine phosphorothioate
  modified_base 122: mod_base = OTHER; note = 2'-O-methyl uridine phosphorothioate
  modified_base 123: mod_base = OTHER; note = 2'-O-methyl guanosine
catggtgcacctgactcctggttttagagctagaaatagcaagttaaaataaggctagtccgttatcaacttgaaaaagtggcaccgagtcggtgcttctctacaggagtcaggtgcaccatg

SEQ ID NO: 20708 - RNA, 122 nt, synthetic construct
  source 1..122: mol_type = other RNA
  modified_base 1: mod_base = OTHER; note = 2'-O-methyl cytidine phosphorothioate
  modified_base 2: mod_base = OTHER; note = 2'-O-methyl adenosine phosphorothioate
  modified_base 3: mod_base = OTHER; note = 2'-O-methyl uridine phosphorothioate
  modified_base 119: mod_base = OTHER; note = cytidine phosphorothioate
  modified_base 120: mod_base = OTHER; note = 2'-O-methyl cytidine phosphorothioate
  modified_base 121: mod_base = OTHER; note = 2'-O-methyl adenosine phosphorothioate
  modified_base 122: mod_base = OTHER; note = 2'-O-methyl uridine
catggtgcacctgactcctggttttagagctagaaatagcaagttaaaataaggctagtccgttatcaacttgaaaaagtggcaccgagtcggtgcttctctacaggagtcaggtgcaccat

SEQ ID NO: 20709 - RNA, 121 nt, synthetic construct
  source 1..121: mol_type = other RNA
  modified_base 1: mod_base = OTHER; note = 2'-O-methyl cytidine phosphorothioate
  modified_base 2: mod_base = OTHER; note = 2'-O-methyl adenosine phosphorothioate
  modified_base 3: mod_base = OTHER; note = 2'-O-methyl uridine phosphorothioate
  modified_base 118: mod_base = OTHER; note = adenosine phosphorothioate
  modified_base 119: mod_base = OTHER; note = 2'-O-methyl cytidine phosphorothioate
  modified_base 120: mod_base = OTHER; note = 2'-O-methyl cytidine phosphorothioate
  modified_base 121: mod_base = OTHER; note = 2'-O-methyl adenosine
catggtgcacctgactcctggttttagagctagaaatagcaagttaaaataaggctagtccgttatcaacttgaaaaagtggcaccgagtcggtgcttctctacaggagtcaggtgcacca

SEQ ID NO: 20710 - RNA, 120 nt, synthetic construct
  source 1..120: mol_type = other RNA
  modified_base 1: mod_base = OTHER; note = 2'-O-methyl cytidine phosphorothioate
  modified_base 2: mod_base = OTHER; note = 2'-O-methyl adenosine phosphorothioate
  modified_base 3: mod_base = OTHER; note = 2'-O-methyl uridine phosphorothioate
  modified_base 117: mod_base = OTHER; note = cytidine phosphorothioate
  modified_base 118: mod_base = OTHER; note = 2'-O-methyl adenosine phosphorothioate
  modified_base 119: mod_base = OTHER; note = 2'-O-methyl cytidine phosphorothioate
  modified_base 120: mod_base = OTHER; note = 2'-O-methyl cytidine
catggtgcacctgactcctggttttagagctagaaatagcaagttaaaataaggctagtccgttatcaacttgaaaaagtggcaccgagtcggtgcttctctacaggagtcaggtgcacc

SEQ ID NO: 20711 - RNA, 119 nt, synthetic construct
  source 1..119: mol_type = other RNA
  modified_base 1: mod_base = OTHER; note = 2'-O-methyl cytidine phosphorothioate
  modified_base 2: mod_base = OTHER; note = 2'-O-methyl adenosine phosphorothioate
  modified_base 3: mod_base = OTHER; note = 2'-O-methyl uridine phosphorothioate
  modified_base 116: mod_base = OTHER; note = guanosine phosphorothioate
  modified_base 117: mod_base = OTHER; note = 2'-O-methyl cytidine phosphorothioate
  modified_base 118: mod_base = OTHER; note = 2'-O-methyl adenosine phosphorothioate
  modified_base 119: mod_base = OTHER; note = 2'-O-methyl cytidine
catggtgcacctgactcctggttttagagctagaaatagcaagttaaaataaggctagtccgttatcaacttgaaaaagtggcaccgagtcggtgcttctctacaggagtcaggtgcac

SEQ ID NO: 20712 - RNA, 118 nt, synthetic construct
  source 1..118: mol_type = other RNA
  modified_base 1: mod_base = OTHER; note = 2'-O-methyl cytidine phosphorothioate
  modified_base 2: mod_base = OTHER; note = 2'-O-methyl adenosine phosphorothioate
  modified_base 3: mod_base = OTHER; note = 2'-O-methyl uridine phosphorothioate
  modified_base 115: mod_base = OTHER; note = uridine phosphorothioate
  modified_base 116: mod_base = OTHER; note = 2'-O-methyl guanosine phosphorothioate
  modified_base 117: mod_base = OTHER; note = 2'-O-methyl cytidine phosphorothioate
  modified_base 118: mod_base = OTHER; note = 2'-O-methyl adenosine
catggtgcacctgactcctggttttagagctagaaatagcaagttaaaataaggctagtccgttatcaacttgaaaaagtggcaccgagtcggtgcttctctacaggagtcaggtgca

SEQ ID NO: 20713 - RNA, 117 nt, synthetic construct
  source 1..117: mol_type = other RNA
  modified_base 1: mod_base = OTHER; note = 2'-O-methyl cytidine phosphorothioate
  modified_base 2: mod_base = OTHER; note = 2'-O-methyl adenosine phosphorothioate
  modified_base 3: mod_base = OTHER; note = 2'-O-methyl uridine phosphorothioate
  modified_base 114: mod_base = OTHER; note = guanosine phosphorothioate
  modified_base 115: mod_base = OTHER; note = 2'-O-methyl uridine phosphorothioate
  modified_base 116: mod_base = OTHER; note = 2'-O-methyl guanosine phosphorothioate
  modified_base 117: mod_base = OTHER; note = 2'-O-methyl cytidine
catggtgcacctgactcctggttttagagctagaaatagcaagttaaaataaggctagtccgttatcaacttgaaaaagtggcaccgagtcggtgcttctctacaggagtcaggtgc

SEQ ID NO: 20714 - RNA, 116 nt, synthetic construct
  source 1..116: mol_type = other RNA
  modified_base 1: mod_base = OTHER; note = 2'-O-methyl cytidine phosphorothioate
  modified_base 2: mod_base = OTHER; note = 2'-O-methyl adenosine phosphorothioate
  modified_base 3: mod_base = OTHER; note = 2'-O-methyl uridine phosphorothioate
  modified_base 113: mod_base = OTHER; note = guanosine phosphorothioate
  modified_base 114: mod_base = OTHER; note = 2'-O-methyl guanosine phosphorothioate
  modified_base 115: mod_base = OTHER; note = 2'-O-methyl uridine phosphorothioate
  modified_base 116: mod_base = OTHER; note = 2'-O-methyl guanosine
catggtgcacctgactcctggttttagagctagaaatagcaagttaaaataaggctagtccgttatcaacttgaaaaagtggcaccgagtcggtgcttctctacaggagtcaggtg

SEQ ID NO: 20715 - RNA, 115 nt, synthetic construct
  source 1..115: mol_type = other RNA
  modified_base 1: mod_base = OTHER; note = 2'-O-methyl cytidine phosphorothioate
  modified_base 2: mod_base = OTHER; note = 2'-O-methyl adenosine phosphorothioate
  modified_base 3: mod_base = OTHER; note = 2'-O-methyl uridine phosphorothioate
  modified_base 112: mod_base = OTHER; note = adenosine phosphorothioate
  modified_base 113: mod_base = OTHER; note = 2'-O-methyl guanosine phosphorothioate
  modified_base 114: mod_base = OTHER; note = 2'-O-methyl guanosine phosphorothioate
  modified_base 115: mod_base = OTHER; note = 2'-O-methyl uridine
catggtgcacctgactcctggttttagagctagaaatagcaagttaaaataaggctagtccgttatcaacttgaaaaagtggcaccgagtcggtgcttctctacaggagtcaggt

SEQ ID NO: 20716 - RNA, 114 nt, synthetic construct
  source 1..114: mol_type = other RNA
  modified_base 1: mod_base = OTHER; note = 2'-O-methyl cytidine phosphorothioate
  modified_base 2: mod_base = OTHER; note = 2'-O-methyl adenosine phosphorothioate
  modified_base 3: mod_base = OTHER; note = 2'-O-methyl uridine phosphorothioate
  modified_base 111: mod_base = OTHER; note = cytidine phosphorothioate
  modified_base 112: mod_base = OTHER; note = 2'-O-methyl adenosine phosphorothioate
  modified_base 113: mod_base = OTHER; note = 2'-O-methyl guanosine phosphorothioate
  modified_base 114: mod_base = OTHER; note = 2'-O-methyl guanosine
catggtgcacctgactcctggttttagagctagaaatagcaagttaaaataaggctagtccgttatcaacttgaaaaagtggcaccgagtcggtgcttctctacaggagtcagg

SEQ ID NO: 20717 - RNA, 122 nt, synthetic construct
  source 1..122: mol_type = other RNA
  modified_base 1: mod_base = OTHER; note = 2'-O-methyl cytidine phosphorothioate
  modified_base 2: mod_base = OTHER; note = 2'-O-methyl adenosine phosphorothioate
  modified_base 3: mod_base = OTHER; note = 2'-O-methyl uridine phosphorothioate
  modified_base 119: mod_base = OTHER; note = cytidine phosphorothioate
  modified_base 120: mod_base = OTHER; note = 2'-O-methyl adenosine phosphorothioate
  modified_base 121: mod_base = OTHER; note = 2'-O-methyl uridine phosphorothioate
  modified_base 122: mod_base = OTHER; note = 2'-O-methyl guanosine
catggtgcacctgactcctggttttagagctagaaatagcaagttaaaataaggctagtccgttatcaacttgaaaaagtggcaccgagtcggtgctctctacaggagtcaggtgcaccatg

SEQ ID NO: 20718 - RNA, 121 nt, synthetic construct
  source 1..121: mol_type = other RNA
  modified_base 1: mod_base = OTHER; note = 2'-O-methyl cytidine phosphorothioate
  modified_base 2: mod_base = OTHER; note = 2'-O-methyl adenosine phosphorothioate
  modified_base 3: mod_base = OTHER; note = 2'-O-methyl uridine phosphorothioate
  modified_base 118: mod_base = OTHER; note = cytidine phosphorothioate
  modified_base 119: mod_base = OTHER; note = 2'-O-methyl cytidine phosphorothioate
  modified_base 120: mod_base = OTHER; note = 2'-O-methyl adenosine phosphorothioate
  modified_base 121: mod_base = OTHER; note = 2'-O-methyl uridine
catggtgcacctgactcctggttttagagctagaaatagcaagttaaaataaggctagtccgttatcaacttgaaaaagtggcaccgagtcggtgctctctacaggagtcaggtgcaccat

SEQ ID NO: 20719 - RNA, 120 nt, synthetic construct
  source 1..120: mol_type = other RNA
  modified_base 1: mod_base = OTHER; note = 2'-O-methyl cytidine phosphorothioate
  modified_base 2: mod_base = OTHER; note = 2'-O-methyl adenosine phosphorothioate
  modified_base 3: mod_base = OTHER; note = 2'-O-methyl uridine phosphorothioate
  modified_base 117: mod_base = OTHER; note = adenosine phosphorothioate
  modified_base 118: mod_base = OTHER; note = 2'-O-methyl cytidine phosphorothioate
  modified_base 119: mod_base = OTHER; note = 2'-O-methyl cytidine phosphorothioate
  modified_base 120: mod_base = OTHER; note = 2'-O-methyl adenosine
catggtgcacctgactcctggttttagagctagaaatagcaagttaaaataaggctagtccgttatcaacttgaaaaagtggcaccgagtcggtgctctctacaggagtcaggtgcacca

SEQ ID NO: 20720 - RNA, 119 nt, synthetic construct
  source 1..119: mol_type = other RNA
  modified_base 1: mod_base = OTHER; note = 2'-O-methyl cytidine phosphorothioate
  modified_base 2: mod_base = OTHER; note = 2'-O-methyl adenosine phosphorothioate
  modified_base 3: mod_base = OTHER; note = 2'-O-methyl uridine phosphorothioate
  modified_base 116: mod_base = OTHER; note = cytidine phosphorothioate
  modified_base 117: mod_base = OTHER; note = 2'-O-methyl adenosine phosphorothioate
  modified_base 118: mod_base = OTHER; note = 2'-O-methyl cytidine phosphorothioate
  modified_base 119: mod_base = OTHER; note = 2'-O-methyl cytidine
catggtgcacctgactcctggttttagagctagaaatagcaagttaaaataaggctagtccgttatcaacttgaaaaagtggcaccgagtcggtgctctctacaggagtcaggtgcacc

SEQ ID NO: 20721 - RNA, 118 nt, synthetic construct
  source 1..118: mol_type = other RNA
  modified_base 1: mod_base = OTHER; note = 2'-O-methyl cytidine phosphorothioate
  modified_base 2: mod_base = OTHER; note = 2'-O-methyl adenosine phosphorothioate
  modified_base 3: mod_base = OTHER; note = 2'-O-methyl uridine phosphorothioate
  modified_base 115: mod_base = OTHER; note = guanosine phosphorothioate
  modified_base 116: mod_base = OTHER; note = 2'-O-methyl cytidine phosphorothioate
  modified_base 117: mod_base = OTHER; note = 2'-O-methyl adenosine phosphorothioate
  modified_base 118: mod_base = OTHER; note = 2'-O-methyl cytidine
catggtgcacctgactcctggttttagagctagaaatagcaagttaaaataaggctagtccgttatcaacttgaaaaagtggcaccgagtcggtgctctctacaggagtcaggtgcac

SEQ ID NO: 20722 - RNA, 117 nt, synthetic construct
  source 1..117: mol_type = other RNA
  modified_base 1: mod_base = OTHER; note = 2'-O-methyl cytidine phosphorothioate
  modified_base 2: mod_base = OTHER; note = 2'-O-methyl adenosine phosphorothioate
  modified_base 3: mod_base = OTHER; note = 2'-O-methyl uridine phosphorothioate
  modified_base 114: mod_base = OTHER; note = uridine phosphorothioate
  modified_base 115: mod_base = OTHER; note = 2'-O-methyl guanosine phosphorothioate
  modified_base 116: mod_base = OTHER; note = 2'-O-methyl cytidine phosphorothioate
  modified_base 117: mod_base = OTHER; note = 2'-O-methyl adenosine
catggtgcacctgactcctggttttagagctagaaatagcaagttaaaataaggctagtccgttatcaacttgaaaaagtggcaccgagtcggtgctctctacaggagtcaggtgca

SEQ ID NO: 20723 - RNA, 116 nt, synthetic construct
  source 1..116: mol_type = other RNA
  modified_base 1: mod_base = OTHER; note = 2'-O-methyl cytidine phosphorothioate
  modified_base 2: mod_base = OTHER; note = 2'-O-methyl adenosine phosphorothioate
  modified_base 3: mod_base = OTHER; note = 2'-O-methyl uridine phosphorothioate
  modified_base 113: mod_base = OTHER; note = guanosine phosphorothioate
  modified_base 114: mod_base = OTHER; note = 2'-O-methyl uridine phosphorothioate
  modified_base 115: mod_base = OTHER; note = 2'-O-methyl guanosine phosphorothioate
  modified_base 116: mod_base = OTHER; note = 2'-O-methyl cytidine
catggtgcacctgactcctggttttagagctagaaatagcaagttaaaataaggctagtccgttatcaacttgaaaaagtggcaccgagtcggtgctctctacaggagtcaggtgc

SEQ ID NO: 20724 - RNA, 115 nt, synthetic construct
  source 1..115: mol_type = other RNA
  modified_base 1: mod_base = OTHER; note = 2'-O-methyl cytidine phosphorothioate
  modified_base 2: mod_base = OTHER; note = 2'-O-methyl adenosine phosphorothioate
  modified_base 3: mod_base = OTHER; note = 2'-O-methyl uridine phosphorothioate
  modified_base 112: mod_base = OTHER; note = guanosine phosphorothioate
  modified_base 113: mod_base = OTHER; note = 2'-O-methyl guanosine phosphorothioate
  modified_base 114: mod_base = OTHER; note = 2'-O-methyl uridine phosphorothioate
  modified_base 115: mod_base = OTHER; note = 2'-O-methyl guanosine
catggtgcacctgactcctggttttagagctagaaatagcaagttaaaataaggctagtccgttatcaacttgaaaaagtggcaccgagtcggtgctctctacaggagtcaggtg

SEQ ID NO: 20725 - RNA, 114 nt, synthetic construct
  source 1..114: mol_type = other RNA
  modified_base 1: mod_base = OTHER; note = 2'-O-methyl cytidine phosphorothioate
  modified_base 2: mod_base = OTHER; note = 2'-O-methyl adenosine phosphorothioate
  modified_base 3: mod_base = OTHER; note = 2'-O-methyl uridine phosphorothioate
  modified_base 111: mod_base = OTHER; note = adenosine phosphorothioate
  modified_base 112: mod_base = OTHER; note = 2'-O-methyl guanosine phosphorothioate
  modified_base 113: mod_base = OTHER; note = 2'-O-methyl guanosine phosphorothioate
  modified_base 114: mod_base = OTHER; note = 2'-O-methyl uridine
catggtgcacctgactcctggttttagagctagaaatagcaagttaaaataaggctagtccgttatcaacttgaaaaagtggcaccgagtcggtgctctctacaggagtcaggt

SEQ ID NO: 20726 - RNA, 113 nt, synthetic construct
  source 1..113: mol_type = other RNA
  modified_base 1: mod_base = OTHER; note = 2'-O-methyl cytidine phosphorothioate
  modified_base 2: mod_base = OTHER; note = 2'-O-methyl adenosine phosphorothioate
  modified_base 3: mod_base = OTHER; note = 2'-O-methyl uridine phosphorothioate
  modified_base 110: mod_base = OTHER; note = cytidine phosphorothioate
  modified_base 111: mod_base = OTHER; note = 2'-O-methyl adenosine phosphorothioate
  modified_base 112: mod_base = OTHER; note = 2'-O-methyl guanosine phosphorothioate
  modified_base 113: mod_base = OTHER; note = 2'-O-methyl guanosine
catggtgcacctgactcctggttttagagctagaaatagcaagttaaaataaggctagtccgttatcaacttgaaaaagtggcaccgagtcggtgctctctacaggagtcagg

SEQ ID NO: 20727 - RNA, 133 nt, synthetic construct
  source 1..133: mol_type = other RNA
  modified_base 1: mod_base = OTHER; note = 2'-O-methyl guanosine phosphorothioate
  modified_base 2: mod_base = OTHER; note = 2'-O-methyl uridine phosphorothioate
  modified_base 3: mod_base = OTHER; note = 2'-O-methyl adenosine phosphorothioate
  modified_base 130: mod_base = OTHER; note = uridine phosphorothioate
  modified_base 131: mod_base = OTHER; note = 2'-O-methyl uridine phosphorothioate
  modified_base 132: mod_base = OTHER; note = 2'-O-methyl adenosine phosphorothioate
  modified_base 133: mod_base = OTHER; note = 2'-O-methyl cytidine
gtaacggcagacttctcctcgttttagagctagaaatagcaagttaaaataaggctagtccgttatcaacttgaaaaagtggcaccgagtcggtgctggtgcacctgactcctgtggagaagtctgccgttac

SEQ ID NO: 20728 - RNA, 132 nt, synthetic construct
  source 1..132: mol_type = other RNA
  modified_base 1: mod_base = OTHER; note = 2'-O-methyl guanosine phosphorothioate
  modified_base 2: mod_base = OTHER; note = 2'-O-methyl uridine phosphorothioate
  modified_base 3: mod_base = OTHER; note = 2'-O-methyl adenosine phosphorothioate
  modified_base 129: mod_base = OTHER; note = guanosine phosphorothioate
  modified_base 130: mod_base = OTHER; note = 2'-O-methyl uridine phosphorothioate
  modified_base 131: mod_base = OTHER; note = 2'-O-methyl uridine phosphorothioate
  modified_base 132: mod_base = OTHER; note = 2'-O-methyl adenosine
gtaacggcagacttctcctcgttttagagctagaaatagcaagttaaaataaggctagtccgttatcaacttgaaaaagtggcaccgagtcggtgctggtgcacctgactcctgtggagaagtctgccgtta

SEQ ID NO: 20729 - RNA, 131 nt, synthetic construct
  source 1..131: mol_type = other RNA
  modified_base 1: mod_base = OTHER; note = 2'-O-methyl guanosine phosphorothioate
  modified_base 2: mod_base = OTHER; note = 2'-O-methyl uridine phosphorothioate
  modified_base 3: mod_base = OTHER; note = 2'-O-methyl adenosine phosphorothioate
  modified_base 128: mod_base = OTHER; note = cytidine phosphorothioate
  modified_base 129: mod_base = OTHER; note = 2'-O-methyl guanosine phosphorothioate
  modified_base 130: mod_base = OTHER; note = 2'-O-methyl uridine phosphorothioate
  modified_base 131: mod_base = OTHER; note = 2'-O-methyl uridine
gtaacggcagacttctcctcgttttagagctagaaatagcaagttaaaataaggctagtccgttatcaacttgaaaaagtggcaccgagtcggtgctggtgcacctgactcctgtggagaagtctgccgtt

SEQ ID NO: 20730 - RNA, 130 nt, synthetic construct
  source 1..130: mol_type = other RNA
  modified_base 1: mod_base = OTHER; note = 2'-O-methyl guanosine phosphorothioate
  modified_base 2: mod_base = OTHER; note = 2'-O-methyl uridine phosphorothioate
  modified_base 3: mod_base = OTHER; note = 2'-O-methyl adenosine phosphorothioate
  modified_base 127: mod_base = OTHER; note = cytidine phosphorothioate
  modified_base 128: mod_base = OTHER; note = 2'-O-methyl cytidine phosphorothioate
  modified_base 129: mod_base = OTHER; note = 2'-O-methyl guanosine phosphorothioate
  modified_base 130: mod_base = OTHER; note = 2'-O-methyl uridine
gtaacggcagacttctcctcgttttagagctagaaatagcaagttaaaataaggctagtccgttatcaacttgaaaaagtggcaccgagtcggtgctggtgcacctgactcctgtggagaagtctgccgt

SEQ ID NO: 20731 - RNA, 129 nt, synthetic construct
  source 1..129: mol_type = other RNA
  modified_base 1: mod_base = OTHER; note = 2'-O-methyl guanosine phosphorothioate
  modified_base 2: mod_base = OTHER; note = 2'-O-methyl uridine phosphorothioate
  modified_base 3: mod_base = OTHER; note = 2'-O-methyl adenosine phosphorothioate
  modified_base 126: mod_base = OTHER; note = guanosine phosphorothioate
  modified_base 127: mod_base = OTHER; note = 2'-O-methyl cytidine phosphorothioate
  modified_base 128: mod_base = OTHER; note = 2'-O-methyl cytidine phosphorothioate
  modified_base 129: mod_base = OTHER; note = 2'-O-methyl guanosine
gtaacggcagacttctcctcgttttagagctagaaatagcaagttaaaataaggctagtccgttatcaacttgaaaaagtggcaccgagtcggtgctggtgcacctgactcctgtggagaagtctgccg

SEQ ID NO: 20732 - RNA, 128 nt, synthetic construct
  source 1..128: mol_type = other RNA
  modified_base 1: mod_base = OTHER; note = 2'-O-methyl guanosine phosphorothioate
  modified_base 2: mod_base = OTHER; note = 2'-O-methyl uridine phosphorothioate
  modified_base 3: mod_base = OTHER; note = 2'-O-methyl adenosine phosphorothioate
  modified_base 125: mod_base = OTHER; note = uridine phosphorothioate
  modified_base 126: mod_base = OTHER; note = 2'-O-methyl guanosine phosphorothioate
  modified_base 127: mod_base = OTHER; note = 2'-O-methyl cytidine phosphorothioate
  modified_base 128: mod_base = OTHER; note = 2'-O-methyl cytidine
gtaacggcagacttctcctcgttttagagctagaaatagcaagttaaaataaggctagtccgttatcaacttgaaaaagtggcaccgagtcggtgctggtgcacctgactcctgtggagaagtctgcc

SEQ ID NO: 20733 - RNA, 127 nt, synthetic construct
  source 1..127: mol_type = other RNA
  modified_base 1: mod_base = OTHER; note = 2'-O-methyl guanosine phosphorothioate
  modified_base 2: mod_base = OTHER; note = 2'-O-methyl uridine phosphorothioate
  modified_base 3: mod_base = OTHER; note = 2'-O-methyl adenosine phosphorothioate
  modified_base 124: mod_base = OTHER; note = cytidine phosphorothioate
  modified_base 125: mod_base = OTHER; note = 2'-O-methyl uridine phosphorothioate
  modified_base 126: mod_base = OTHER; note = 2'-O-methyl guanosine phosphorothioate
  modified_base 127: mod_base = OTHER; note = 2'-O-methyl cytidine
gtaacggcagacttctcctcgttttagagctagaaatagcaagttaaaataaggctagtccgttatcaacttgaaaaagtggcaccgagtcggtgctggtgcacctgactcctgtggagaagtctgc

SEQ ID NO: 20734 - RNA, 126 nt, synthetic construct
  source 1..126: mol_type = other RNA
  modified_base 1: mod_base = OTHER; note = 2'-O-methyl guanosine phosphorothioate
  modified_base 2: mod_base = OTHER; note = 2'-O-methyl uridine phosphorothioate
  modified_base 3: mod_base = OTHER; note = 2'-O-methyl adenosine phosphorothioate
  modified_base 123: mod_base = OTHER; note = uridine phosphorothioate
  modified_base 124: mod_base = OTHER; note = 2'-O-methyl cytidine phosphorothioate
  modified_base 125: mod_base = OTHER; note = 2'-O-methyl uridine phosphorothioate
  modified_base 126: mod_base = OTHER; note = 2'-O-methyl guanosine
gtaacggcagacttctcctcgttttagagctagaaatagcaagttaaaataaggctagtccgttatcaacttgaaaaagtggcaccgagtcggtgctggtgcacctgactcctgtggagaagtctg

SEQ ID NO: 20735 - RNA, 125 nt, synthetic construct
  source 1..125: mol_type = other RNA
  modified_base 1: mod_base = OTHER; note = 2'-O-methyl guanosine phosphorothioate
  modified_base 2: mod_base = OTHER; note = 2'-O-methyl uridine phosphorothioate
  modified_base 3: mod_base = OTHER; note = 2'-O-methyl adenosine phosphorothioate
  modified_base 122: mod_base = OTHER; note = guanosine phosphorothioate
  modified_base 123: mod_base = OTHER; note = 2'-O-methyl uridine phosphorothioate
  modified_base 124: mod_base = OTHER; note = 2'-O-methyl cytidine phosphorothioate
  modified_base 125: mod_base = OTHER; note = 2'-O-methyl uridine
gtaacggcagacttctcctcgttttagagctagaaatagcaagttaaaataaggctagtccgttatcaacttgaaaaagtggcaccgagtcggtgctggtgcacctgactcctgtggagaagtct

SEQ ID NO: 20736 - RNA, 124 nt, synthetic construct
  source 1..124: mol_type = other RNA
  modified_base 1: mod_base = OTHER; note = 2'-O-methyl guanosine phosphorothioate
  modified_base 2: mod_base = OTHER; note = 2'-O-methyl uridine phosphorothioate
  modified_base 3: mod_base = OTHER; note = 2'-O-methyl adenosine phosphorothioate
  modified_base 121: mod_base = OTHER; note = adenosine phosphorothioate
  modified_base 122: mod_base = OTHER; note = 2'-O-methyl guanosine phosphorothioate
  modified_base 123: mod_base = OTHER; note = 2'-O-methyl uridine phosphorothioate
  modified_base 124: mod_base = OTHER; note = 2'-O-methyl cytidine
gtaacggcagacttctcctcgttttagagctagaaatagcaagttaaaataaggctagtccgttatcaacttgaaaaagtggcaccgagtcggtgctggtgcacctgactcctgtggagaagtc

SEQ ID NO: 20737 - RNA, 132 nt, synthetic construct
  source 1..132: mol_type = other RNA
  modified_base 1: mod_base = OTHER; note = 2'-O-methyl guanosine phosphorothioate
  modified_base 2: mod_base = OTHER; note = 2'-O-methyl uridine phosphorothioate
  modified_base 3: mod_base = OTHER; note = 2'-O-methyl adenosine phosphorothioate
  modified_base 129: mod_base = OTHER; note = uridine phosphorothioate
  modified_base 130: mod_base = OTHER; note = 2'-O-methyl uridine phosphorothioate
  modified_base 131: mod_base = OTHER; note = 2'-O-methyl adenosine phosphorothioate
  modified_base 132: mod_base = OTHER; note = 2'-O-methyl cytidine
gtaacggcagacttctcctcgttttagagctagaaatagcaagttaaaataaggctagtccgttatcaacttgaaaaagtggcaccgagtcggtgcggtgcacctgactcctgtggagaagtctgccgttac

SEQ ID NO: 20738 - RNA, 131 nt, synthetic construct
  source 1..131: mol_type = other RNA
  modified_base 1: mod_base = OTHER; note = 2'-O-methyl guanosine phosphorothioate
  modified_base 2: mod_base = OTHER; note = 2'-O-methyl uridine phosphorothioate
  modified_base 3: mod_base = OTHER; note = 2'-O-methyl adenosine phosphorothioate
  modified_base 128: mod_base = OTHER; note = guanosine phosphorothioate
  modified_base 129: mod_base = OTHER; note = 2'-O-methyl uridine phosphorothioate
  modified_base 130: mod_base = OTHER; note = 2'-O-methyl uridine phosphorothioate
  modified_base 131: mod_base = OTHER; note = 2'-O-methyl adenosine
gtaacggcagacttctcctcgttttagagctagaaatagcaagttaaaataaggctagtccgttatcaacttgaaaaagtggcaccgagtcggtgcggtgcacctgactcctgtggagaagtctgccgtta

SEQ ID NO: 20739 - RNA, 130 nt, synthetic construct
  source 1..130: mol_type = other RNA
  modified_base 1: mod_base = OTHER; note = 2'-O-methyl guanosine phosphorothioate
  modified_base 2: mod_base = OTHER; note = 2'-O-methyl uridine phosphorothioate
  modified_base 3: mod_base = OTHER; note = 2'-O-methyl adenosine phosphorothioate
  modified_base 127: mod_base = OTHER; note = cytidine phosphorothioate
  modified_base 128: mod_base = OTHER; note = 2'-O-methyl guanosine phosphorothioate
  modified_base 129: mod_base = OTHER; note = 2'-O-methyl uridine phosphorothioate
  modified_base 130: mod_base = OTHER; note = 2'-O-methyl uridine
gtaacggcagacttctcctcgttttagagctagaaatagcaagttaaaataaggctagtccgttatcaacttgaaaaagtggcaccgagtcggtgcggtgcacctgactcctgtggagaagtctgccgtt

SEQ ID NO: 20740 - RNA, 129 nt, synthetic construct
  source 1..129: mol_type = other RNA
  modified_base 1: mod_base = OTHER; note = 2'-O-methyl guanosine phosphorothioate
  modified_base 2: mod_base = OTHER; note = 2'-O-methyl uridine phosphorothioate
  modified_base 3: mod_base = OTHER; note = 2'-O-methyl adenosine phosphorothioate
  modified_base 126: mod_base = OTHER; note = cytidine phosphorothioate
  modified_base 127: mod_base = OTHER; note = 2'-O-methyl cytidine phosphorothioate
  modified_base 128: mod_base = OTHER; note = 2'-O-methyl guanosine phosphorothioate
  modified_base 129: mod_base = OTHER; note = 2'-O-methyl uridine
gtaacggcagacttctcctcgttttagagctagaaatagcaagttaaaataaggctagtccgttatcaacttgaaaaagtggcaccgagtcggtgcggtgcacctgactcctgtggagaagtctgccgt

SEQ ID NO: 20741 - RNA, 128 nt, synthetic construct
  source 1..128: mol_type = other RNA
  modified_base 1: mod_base = OTHER; note = 2'-O-methyl guanosine phosphorothioate
  modified_base 2: mod_base = OTHER; note = 2'-O-methyl uridine phosphorothioate
  modified_base 3: mod_base = OTHER; note = 2'-O-methyl adenosine phosphorothioate
  modified_base 125: mod_base = OTHER; note = guanosine phosphorothioate
  modified_base 126: mod_base = OTHER; note = 2'-O-methyl cytidine phosphorothioate
  modified_base 127: mod_base = OTHER; note = 2'-O-methyl cytidine phosphorothioate
  modified_base 128: mod_base = OTHER; note = 2'-O-methyl guanosine
gtaacggcagacttctcctcgttttagagctagaaatagcaagttaaaataaggctagtccgttatcaacttgaaaaagtggcaccgagtcggtgcggtgcacctgactcctgtggagaagtctgccg

SEQ ID NO: 20742 - RNA, 127 nt, synthetic construct
  source 1..127: mol_type = other RNA
  modified_base 1: mod_base = OTHER; note = 2'-O-methyl guanosine phosphorothioate
  modified_base 2: mod_base = OTHER; note = 2'-O-methyl uridine phosphorothioate
  modified_base 3: mod_base = OTHER; note = 2'-O-methyl adenosine phosphorothioate
  modified_base 124: mod_base = OTHER; note = uridine phosphorothioate
  modified_base 125: mod_base = OTHER; note = 2'-O-methyl guanosine phosphorothioate
  modified_base 126: mod_base = OTHER; note = 2'-O-methyl cytidine phosphorothioate
  modified_base 127: mod_base = OTHER; note = 2'-O-methyl cytidine
gtaacggcagacttctcctcgttttagagctagaaatagcaagttaaaataaggctagtccgttatcaacttgaaaaagtggcaccgagtcggtgcggtgcacctgactcctgtggagaagtctgcc

SEQ ID NO: 20743 - RNA, 126 nt, synthetic construct
  source 1..126: mol_type = other RNA
  modified_base 1: mod_base = OTHER; note = 2'-O-methyl guanosine phosphorothioate
  modified_base 2: mod_base = OTHER; note = 2'-O-methyl uridine phosphorothioate
  modified_base 3: mod_base = OTHER; note = 2'-O-methyl adenosine phosphorothioate
  modified_base 123: mod_base = OTHER; note = cytidine phosphorothioate
  modified_base 124: mod_base = OTHER; note = 2'-O-methyl uridine phosphorothioate
  modified_base 125: mod_base = OTHER; note = 2'-O-methyl guanosine phosphorothioate
  modified_base 126: mod_base = OTHER; note = 2'-O-methyl cytidine
gtaacggcagacttctcctcgttttagagctagaaatagcaagttaaaataaggctagtccgttatcaacttgaaaaagtggcaccgagtcggtgcggtgcacctgactcctgtggagaagtctgc

SEQ ID NO: 20744 - RNA, 125 nt, synthetic construct
  source 1..125: mol_type = other RNA
  modified_base 1: mod_base = OTHER; note = 2'-O-methyl guanosine phosphorothioate
  modified_base 2: mod_base = OTHER; note = 2'-O-methyl uridine phosphorothioate
  modified_base 3: mod_base = OTHER; note = 2'-O-methyl adenosine phosphorothioate
  modified_base 122: mod_base = OTHER; note = uridine phosphorothioate
  modified_base 123: mod_base = OTHER; note = 2'-O-methyl cytidine phosphorothioate
  modified_base 124: mod_base = OTHER; note = 2'-O-methyl uridine phosphorothioate
  modified_base 125: mod_base = OTHER; note = 2'-O-methyl guanosine
gtaacggcagacttctcctcgttttagagctagaaatagcaagttaaaataaggctagtccgttatcaacttgaaaaagtggcaccgagtcggtgcggtgcacctgactcctgtggagaagtctg

SEQ ID NO: 20745 - RNA, 124 nt, synthetic construct
  source 1..124: mol_type = other RNA
  modified_base 1: mod_base = OTHER; note = 2'-O-methyl guanosine phosphorothioate
  modified_base 2: mod_base = OTHER; note = 2'-O-methyl uridine phosphorothioate
  modified_base 3: mod_base = OTHER; note = 2'-O-methyl adenosine phosphorothioate
  modified_base 121: mod_base = OTHER; note = guanosine phosphorothioate
  modified_base 122: mod_base = OTHER; note = 2'-O-methyl uridine phosphorothioate
  modified_base 123: mod_base = OTHER; note = 2'-O-methyl cytidine phosphorothioate
  modified_base 124: mod_base = OTHER; note = 2'-O-methyl uridine
gtaacggcagacttctcctcgttttagagctagaaatagcaagttaaaataaggctagtccgttatcaacttgaaaaagtggcaccgagtcggtgcggtgcacctgactcctgtggagaagtct

SEQ ID NO: 20746 - RNA, 123 nt, synthetic construct
  source 1..123: mol_type = other RNA
  modified_base 1: mod_base = OTHER; note = 2'-O-methyl guanosine phosphorothioate
  modified_base 2: mod_base = OTHER; note = 2'-O-methyl uridine phosphorothioate
  modified_base 3: mod_base = OTHER; note = 2'-O-methyl adenosine phosphorothioate
  modified_base 120: mod_base = OTHER; note = adenosine phosphorothioate
  modified_base 121: mod_base = OTHER; note = 2'-O-methyl guanosine phosphorothioate
  modified_base 122: mod_base = OTHER; note = 2'-O-methyl uridine phosphorothioate
  modified_base 123: mod_base = OTHER; note = 2'-O-methyl cytidine
gtaacggcagacttctcctcgttttagagctagaaatagcaagttaaaataaggctagtccgttatcaacttgaaaaagtggcaccgagtcggtgcggtgcacctgactcctgtggagaagtc

SEQ ID NO: 20747 - RNA, 131 nt, synthetic construct
  source 1..131: mol_type = other RNA
  modified_base 1: mod_base = OTHER; note = 2'-O-methyl guanosine phosphorothioate
  modified_base 2: mod_base = OTHER; note = 2'-O-methyl uridine phosphorothioate
  modified_base 3: mod_base = OTHER; note = 2'-O-methyl adenosine phosphorothioate
  modified_base 128: mod_base = OTHER; note = uridine phosphorothioate
  modified_base 129: mod_base = OTHER; note = 2'-O-methyl uridine phosphorothioate
  modified_base 130: mod_base = OTHER; note = 2'-O-methyl adenosine phosphorothioate
  modified_base 131: mod_base = OTHER; note = 2'-O-methyl cytidine
gtaacggcagacttctcctcgttttagagctagaaatagcaagttaaaataaggctagtccgttatcaacttgaaaaagtggcaccgagtcggtgcgtgcacctgactcctgtggagaagtctgccgttac

SEQ ID NO: 20748 - RNA, 130 nt, synthetic construct
  source 1..130: mol_type = other RNA
  modified_base 1: mod_base = OTHER; note = 2'-O-methyl guanosine phosphorothioate
  modified_base 2: mod_base = OTHER; note = 2'-O-methyl uridine phosphorothioate
  modified_base 3: mod_base = OTHER; note = 2'-O-methyl adenosine phosphorothioate
  modified_base 127: mod_base = OTHER; note = guanosine phosphorothioate
  modified_base 128: mod_base = OTHER; note = 2'-O-methyl uridine phosphorothioate
  modified_base 129: mod_base = OTHER; note = 2'-O-methyl uridine phosphorothioate
  modified_base 130: mod_base = OTHER; note = 2'-O-methyl adenosine
gtaacggcagacttctcctcgttttagagctagaaatagcaagttaaaataaggctagtccgttatcaacttgaaaaagtggcaccgagtcggtgcgtgcacctgactcctgtggagaagtctgccgtta

SEQ ID NO: 20749 - RNA, 129 nt, synthetic construct
  source 1..129: mol_type = other RNA
  modified_base 1: mod_base = OTHER; note = 2'-O-methyl guanosine phosphorothioate
  modified_base 2: mod_base = OTHER; note = 2'-O-methyl uridine phosphorothioate
  modified_base 3: mod_base = OTHER; note = 2'-O-methyl adenosine phosphorothioate
  modified_base 126: mod_base = OTHER; note = cytidine phosphorothioate
  modified_base 127: mod_base = OTHER; note = 2'-O-methyl guanosine phosphorothioate
  modified_base 128: mod_base = OTHER; note = 2'-O-methyl uridine phosphorothioate
  modified_base 129: mod_base = OTHER; note = 2'-O-methyl uridine
gtaacggcagacttctcctcgttttagagctagaaatagcaagttaaaataaggctagtccgttatcaacttgaaaaagtggcaccgagtcggtgcgtgcacctgactcctgtggagaagtctgccgtt

SEQ ID NO: 20750 - RNA, 128 nt, synthetic construct
  source 1..128: mol_type = other RNA
  modified_base 1: mod_base = OTHER; note = 2'-O-methyl guanosine phosphorothioate
  modified_base 2: mod_base = OTHER; note = 2'-O-methyl uridine phosphorothioate
  modified_base 3: mod_base = OTHER; note = 2'-O-methyl adenosine phosphorothioate
  modified_base 125: mod_base = OTHER; note = cytidine phosphorothioate
  modified_base 126: mod_base = OTHER; note = 2'-O-methyl cytidine phosphorothioate
  modified_base 127: mod_base = OTHER; note = 2'-O-methyl guanosine phosphorothioate
  modified_base 128: mod_base = OTHER; note = 2'-O-methyl uridine
gtaacggcagacttctcctcgttttagagctagaaatagcaagttaaaataaggctagtccgttatcaacttgaaaaagtggcaccgagtcggtgcgtgcacctgactcctgtggagaagtctgccgt

SEQ ID NO: 20751 - RNA, 127 nt, synthetic construct
  source 1..127: mol_type = other RNA
  modified_base 1: mod_base = OTHER; note = 2'-O-methyl guanosine phosphorothioate
  modified_base 2: mod_base = OTHER; note = 2'-O-methyl uridine phosphorothioate
  modified_base 3: mod_base = OTHER; note = 2'-O-methyl adenosine phosphorothioate
  modified_base 124: mod_base = OTHER; note = guanosine phosphorothioate
  modified_base 125: mod_base = OTHER; note = 2'-O-methyl cytidine phosphorothioate
  modified_base 126: mod_base = OTHER; note = 2'-O-methyl cytidine phosphorothioate
  modified_base 127: mod_base = OTHER; note = 2'-O-methyl guanosine
gtaacggcagacttctcctcgttttagagctagaaatagcaagttaaaataaggctagtccgttatcaacttgaaaaagtggcaccgagtcggtgcgtgcacctgactcctgtggagaagtctgccg

SEQ ID NO: 20752 - RNA, 126 nt, synthetic construct
  source 1..126: mol_type = other RNA
  modified_base 1: mod_base = OTHER; note = 2'-O-methyl guanosine phosphorothioate
  modified_base 2: mod_base = OTHER; note = 2'-O-methyl uridine phosphorothioate
  modified_base 3: mod_base = OTHER; note = 2'-O-methyl adenosine phosphorothioate
  modified_base 123: mod_base = OTHER; note = uridine phosphorothioate
  modified_base 124: mod_base = OTHER; note = 2'-O-methyl guanosine phosphorothioate
  modified_base 125: mod_base = OTHER; note = 2'-O-methyl cytidine phosphorothioate
  modified_base 126: mod_base = OTHER; note = 2'-O-methyl cytidine
gtaacggcagacttctcctcgttttagagctagaaatagcaagttaaaataaggctagtccgttatcaacttgaaaaagtggcaccgagtcggtgcgtgcacctgactcctgtggagaagtctgcc

SEQ ID NO: 20753 - RNA, 125 nt, synthetic construct
  source 1..125: mol_type = other RNA
  modified_base 1: mod_base = OTHER; note = 2'-O-methyl guanosine phosphorothioate
  modified_base 2: mod_base = OTHER; note = 2'-O-methyl uridine phosphorothioate
  modified_base 3: mod_base = OTHER; note = 2'-O-methyl adenosine phosphorothioate
  modified_base 122: mod_base = OTHER; note = cytidine phosphorothioate
  modified_base 123: mod_base = OTHER; note = 2'-O-methyl uridine phosphorothioate
  modified_base 124: mod_base = OTHER; note = 2'-O-methyl guanosine phosphorothioate
  modified_base 125: mod_base = OTHER; note = 2'-O-methyl cytidine
gtaacggcagacttctcctcgttttagagctagaaatagcaagttaaaataaggctagtccgttatcaacttgaaaaagtggcaccgagtcggtgcgtgcacctgactcctgtggagaagtctgc

SEQ ID NO: 20754 - RNA, 124 nt, synthetic construct
  source 1..124: mol_type = other RNA
  modified_base 1: mod_base = OTHER; note = 2'-O-methyl guanosine phosphorothioate
  modified_base 2: mod_base = OTHER; note = 2'-O-methyl uridine phosphorothioate
  modified_base 3: mod_base = OTHER; note = 2'-O-methyl adenosine phosphorothioate
  modified_base 121: mod_base = OTHER; note = uridine phosphorothioate
  modified_base 122: mod_base = OTHER; note = 2'-O-methyl cytidine phosphorothioate
  modified_base 123: mod_base = OTHER; note = 2'-O-methyl uridine phosphorothioate
  modified_base 124: mod_base = OTHER; note = 2'-O-methyl guanosine
gtaacggcagacttctcctcgttttagagctagaaatagcaagttaaaataaggctagtccgttatcaacttgaaaaagtggcaccgagtcggtgcgtgcacctgactcctgtggagaagtctg

SEQ ID NO: 20755 - RNA, 123 nt, synthetic construct
  source 1..123: mol_type = other RNA
  modified_base 1: mod_base = OTHER; note = 2'-O-methyl guanosine phosphorothioate
  modified_base 2: mod_base = OTHER; note = 2'-O-methyl uridine phosphorothioate
  modified_base 3: mod_base = OTHER; note = 2'-O-methyl adenosine phosphorothioate
  modified_base 120: mod_base = OTHER; note = guanosine phosphorothioate
  modified_base 121: mod_base = OTHER; note = 2'-O-methyl uridine phosphorothioate
  modified_base 122: mod_base = OTHER; note = 2'-O-methyl cytidine phosphorothioate
  modified_base 123: mod_base = OTHER; note = 2'-O-methyl uridine
gtaacggcagacttctcctcgttttagagctagaaatagcaagttaaaataaggctagtccgttatcaacttgaaaaagtggcaccgagtcggtgcgtgcacctgactcctgtggagaagtct

SEQ ID NO: 20756 - RNA, 122 nt, synthetic construct
  source 1..122: mol_type = other RNA
  modified_base 1: mod_base = OTHER; note = 2'-O-methyl guanosine phosphorothioate
  modified_base 2: mod_base = OTHER; note = 2'-O-methyl uridine phosphorothioate
  modified_base 3: mod_base = OTHER; note = 2'-O-methyl adenosine phosphorothioate
  modified_base 119: mod_base = OTHER; note = adenosine phosphorothioate
  modified_base 120: mod_base = OTHER; note = 2'-O-methyl guanosine phosphorothioate
  modified_base 121: mod_base = OTHER; note = 2'-O-methyl uridine phosphorothioate
  modified_base 122: mod_base = OTHER; note = 2'-O-methyl cytidine
gtaacggcagacttctcctcgttttagagctagaaatagcaagttaaaataaggctagtccgttatcaacttgaaaaagtggcaccgagtcggtgcgtgcacctgactcctgtggagaagtc

SEQ ID NO: 20757 - RNA, 130 nt, synthetic construct
  source 1..130: mol_type = other RNA
  modified_base 1: mod_base = OTHER; note = 2'-O-methyl guanosine phosphorothioate
  modified_base 2: mod_base = OTHER; note = 2'-O-methyl uridine phosphorothioate
  modified_base 3: mod_base = OTHER; note = 2'-O-methyl adenosine phosphorothioate
  modified_base 127: mod_base = OTHER; note = uridine phosphorothioate
  modified_base 128: mod_base = OTHER; note = 2'-O-methyl uridine phosphorothioate
  modified_base 129: mod_base = OTHER; note = 2'-O-methyl adenosine phosphorothioate
  modified_base 130: mod_base = OTHER; note = 2'-O-methyl cytidine
gtaacggcagacttctcctcgttttagagctagaaatagcaagttaaaataaggctagtccgttatcaacttgaaaaagtggcaccgagtcggtgctgcacctgactcctgtggagaagtctgccgttac

SEQ ID NO: 20758 - RNA, 129 nt, synthetic construct
  source 1..129: mol_type = other RNA
  modified_base 1: mod_base = OTHER; note = 2'-O-methyl guanosine phosphorothioate
  modified_base 2: mod_base = OTHER; note = 2'-O-methyl uridine phosphorothioate
  modified_base 3: mod_base = OTHER; note = 2'-O-methyl adenosine phosphorothioate
  modified_base 126: mod_base = OTHER; note = guanosine phosphorothioate
  modified_base 127: mod_base = OTHER; note = 2'-O-methyl uridine phosphorothioate
  modified_base 128: mod_base = OTHER; note = 2'-O-methyl uridine phosphorothioate
  modified_base 129: mod_base = OTHER; note = 2'-O-methyl adenosine
gtaacggcagacttctcctcgttttagagctagaaatagcaagttaaaataaggctagtccgttatcaacttgaaaaagtggcaccgagtcggtgctgcacctgactcctgtggagaagtctgccgtta

SEQ ID NO: 20759 - RNA, 128 nt, synthetic construct
  source 1..128: mol_type = other RNA
  modified_base 1: mod_base = OTHER; note = 2'-O-methyl guanosine phosphorothioate
  modified_base 2: mod_base = OTHER; note = 2'-O-methyl uridine phosphorothioate
  modified_base 3: mod_base = OTHER; note = 2'-O-methyl adenosine phosphorothioate
  modified_base 125: mod_base = OTHER; note = cytidine phosphorothioate
  modified_base 126: mod_base = OTHER; note = 2'-O-methyl guanosine phosphorothioate
  modified_base 127: mod_base = OTHER; note = 2'-O-methyl uridine phosphorothioate
  modified_base 128: mod_base = OTHER; note = 2'-O-methyl uridine
gtaacggcagacttctcctcgttttagagctagaaatagcaagttaaaataaggctagtccgttatcaacttgaaaaagtggcaccgagtcggtgctgcacctgactcctgtggagaagtctgccgtt

SEQ ID NO: 20760 - RNA, 127 nt, synthetic construct
  source 1..127: mol_type = other RNA
  modified_base 1: mod_base = OTHER; note = 2'-O-methyl guanosine phosphorothioate
  modified_base 2: mod_base = OTHER; note = 2'-O-methyl uridine phosphorothioate
  modified_base 3: mod_base = OTHER; note = 2'-O-methyl adenosine phosphorothioate
  modified_base 124: mod_base = OTHER; note = cytidine phosphorothioate
  modified_base 125: mod_base = OTHER; note = 2'-O-methyl cytidine phosphorothioate
  modified_base 126: mod_base = OTHER; note = 2'-O-methyl guanosine phosphorothioate
  modified_base 127: mod_base = OTHER; note = 2'-O-methyl uridine
gtaacggcagacttctcctcgttttagagctagaaatagcaagttaaaataaggctagtccgttatcaacttgaaaaagtggcaccgagtcggtgctgcacctgactcctgtggagaagtctgccgt

SEQ ID NO: 20761 - RNA, 126 nt, synthetic construct
  source 1..126: mol_type = other RNA
  modified_base 1: mod_base = OTHER; note = 2'-O-methyl guanosine phosphorothioate
  modified_base 2: mod_base = OTHER; note = 2'-O-methyl uridine phosphorothioate
  modified_base 3: mod_base = OTHER; note = 2'-O-methyl adenosine phosphorothioate
  modified_base 123: mod_base = OTHER; note = guanosine phosphorothioate
  modified_base 124: mod_base = OTHER; note = 2'-O-methyl cytidine phosphorothioate
  modified_base 125: mod_base = OTHER; note = 2'-O-methyl cytidine phosphorothioate
  modified_base 126: mod_base = OTHER; note = 2'-O-methyl guanosine
gtaacggcagacttctcctcgttttagagctagaaatagcaagttaaaataaggctagtccgttatcaacttgaaaaagtggcaccgagtcggtgctgcacctgactcctgtggagaagtctgccg

SEQ ID NO: 20762 - RNA, 125 nt, synthetic construct
  source 1..125: mol_type = other RNA
  modified_base 1: mod_base = OTHER; note = 2'-O-methyl guanosine phosphorothioate
  modified_base 2: mod_base = OTHER; note = 2'-O-methyl uridine phosphorothioate
  modified_base 3: mod_base = OTHER; note = 2'-O-methyl adenosine phosphorothioate
  modified_base 122: mod_base = OTHER; note = uridine phosphorothioate
  modified_base 123: mod_base = OTHER; note = 2'-O-methyl guanosine phosphorothioate
  modified_base 124: mod_base = OTHER; note = 2'-O-methyl cytidine phosphorothioate
  modified_base 125: mod_base = OTHER; note = 2'-O-methyl cytidine
gtaacggcagacttctcctcgttttagagctagaaatagcaagttaaaataaggctagtccgttatcaacttgaaaaagtggcaccgagtcggtgctgcacctgactcctgtggagaagtctgcc

SEQ ID NO: 20763 - RNA, 124 nt, synthetic construct
  source 1..124: mol_type = other RNA
  modified_base 1: mod_base = OTHER; note = 2'-O-methyl guanosine phosphorothioate
  modified_base 2: mod_base = OTHER; note = 2'-O-methyl uridine phosphorothioate
  modified_base 3: mod_base = OTHER; note = 2'-O-methyl adenosine phosphorothioate
  modified_base 121: mod_base = OTHER; note = cytidine phosphorothioate
  modified_base 122: mod_base = OTHER; note = 2'-O-methyl uridine phosphorothioate
  modified_base 123: mod_base = OTHER; note = 2'-O-methyl guanosine phosphorothioate
  modified_base 124: mod_base = OTHER; note = 2'-O-methyl cytidine
gtaacggcagacttctcctcgttttagagctagaaatagcaagttaaaataaggctagtccgttatcaacttgaaaaagtggcaccgagtcggtgctgcacctgactcctgtggagaagtctgc

SEQ ID NO: 20764 - RNA, 123 nt, synthetic construct
  source 1..123: mol_type = other RNA
  modified_base 1: mod_base = OTHER; note = 2'-O-methyl guanosine phosphorothioate
  modified_base 2: mod_base = OTHER; note = 2'-O-methyl uridine phosphorothioate
  modified_base 3: mod_base = OTHER; note = 2'-O-methyl adenosine phosphorothioate
  modified_base 120: mod_base = OTHER; note = uridine phosphorothioate
  modified_base 121: mod_base = OTHER; note = 2'-O-methyl cytidine phosphorothioate
  modified_base 122: mod_base = OTHER; note = 2'-O-methyl uridine phosphorothioate
  modified_base 123: mod_base = OTHER; note = 2'-O-methyl guanosine
gtaacggcagacttctcctcgttttagagctagaaatagcaagttaaaataaggctagtccgttatcaacttgaaaaagtggcaccgagtcggtgctgcacctgactcctgtggagaagtctg

SEQ ID NO: 20765 - RNA, 122 nt, synthetic construct
  source 1..122: mol_type = other RNA
  modified_base 1: mod_base = OTHER; note = 2'-O-methyl guanosine phosphorothioate
  modified_base 2: mod_base = OTHER; note = 2'-O-methyl uridine phosphorothioate
  modified_base 3: mod_base = OTHER; note = 2'-O-methyl adenosine phosphorothioate
  modified_base 119: mod_base = OTHER; note = guanosine phosphorothioate
  modified_base 120: mod_base = OTHER; note = 2'-O-methyl uridine phosphorothioate
  modified_base 121: mod_base = OTHER; note = 2'-O-methyl cytidine phosphorothioate
  modified_base 122: mod_base = OTHER; note = 2'-O-methyl uridine
gtaacggcagacttctcctcgttttagagctagaaatagcaagttaaaataaggctagtccgttatcaacttgaaaaagtggcaccgagtcggtgctgcacctgactcctgtggagaagtct

SEQ ID NO: 20766 - RNA, 121 nt, synthetic construct
  source 1..121: mol_type = other RNA
  modified_base 1: mod_base = OTHER; note = 2'-O-methyl guanosine phosphorothioate
  modified_base 2: mod_base = OTHER; note = 2'-O-methyl uridine phosphorothioate
  modified_base 3: mod_base = OTHER; note = 2'-O-methyl adenosine phosphorothioate
  modified_base 118: mod_base = OTHER; note = adenosine phosphorothioate
  modified_base 119: mod_base = OTHER; note = 2'-O-methyl guanosine phosphorothioate
  modified_base 120: mod_base = OTHER; note = 2'-O-methyl uridine phosphorothioate
  modified_base 121: mod_base = OTHER; note = 2'-O-methyl cytidine
gtaacggcagacttctcctcgttttagagctagaaatagcaagttaaaataaggctagtccgttatcaacttgaaaaagtggcaccgagtcggtgctgcacctgactcctgtggagaagtc

SEQ ID NO: 20767 - RNA, 129 nt, synthetic construct
  source 1..129: mol_type = other RNA
  modified_base 1: mod_base = OTHER; note = 2'-O-methyl guanosine phosphorothioate
  modified_base 2: mod_base = OTHER; note = 2'-O-methyl uridine phosphorothioate
  modified_base 3: mod_base = OTHER; note = 2'-O-methyl adenosine phosphorothioate
  modified_base 126: mod_base = OTHER; note = uridine phosphorothioate
  modified_base 127: mod_base = OTHER; note = 2'-O-methyl uridine phosphorothioate
  modified_base 128: mod_base = OTHER; note = 2'-O-methyl adenosine phosphorothioate
  modified_base 129: mod_base = OTHER; note = 2'-O-methyl cytidine
gtaacggcagacttctcctcgttttagagctagaaatagcaagttaaaataaggctagtccgttatcaacttgaaaaagtggcaccgagtcggtgcgcacctgactcctgtggagaagtctgccgttac

SEQ ID NO: 20768 - RNA, 128 nt, synthetic construct
  source 1..128: mol_type = other RNA
  modified_base 1: mod_base = OTHER; note = 2'-O-methyl guanosine phosphorothioate
  modified_base 2: mod_base = OTHER; note = 2'-O-methyl uridine phosphorothioate
  modified_base 3: mod_base = OTHER; note = 2'-O-methyl adenosine phosphorothioate
  modified_base 125: mod_base = OTHER; note = guanosine phosphorothioate
  modified_base 126: mod_base = OTHER; note = 2'-O-methyl uridine phosphorothioate
  modified_base 127: mod_base = OTHER; note = 2'-O-methyl uridine phosphorothioate
  modified_base 128: mod_base = OTHER; note = 2'-O-methyl adenosine
gtaacggcagacttctcctcgttttagagctagaaatagcaagttaaaataaggctagtccgttatcaacttgaaaaagtggcaccgagtcggtgcgcacctgactcctgtggagaagtctgccgtta

SEQ ID NO: 20769 - RNA, 127 nt, synthetic construct
  source 1..127: mol_type = other RNA
  modified_base 1: mod_base = OTHER; note = 2'-O-methyl guanosine phosphorothioate
  modified_base 2: mod_base = OTHER; note = 2'-O-methyl uridine phosphorothioate
  modified_base 3: mod_base = OTHER; note = 2'-O-methyl adenosine phosphorothioate
  modified_base 124: mod_base = OTHER; note = cytidine phosphorothioate
  modified_base 125: mod_base = OTHER; note = 2'-O-methyl guanosine phosphorothioate
  modified_base 126: mod_base = OTHER; note = 2'-O-methyl uridine phosphorothioate
  modified_base 127: mod_base = OTHER; note = 2'-O-methyl uridine
gtaacggcagacttctcctcgttttagagctagaaatagcaagttaaaataaggctagtccgttatcaacttgaaaaagtggcaccgagtcggtgcgcacctgactcctgtggagaagtctgccgtt

SEQ ID NO: 20770 - RNA, 126 nt, synthetic construct
  source 1..126: mol_type = other RNA
  modified_base 1: mod_base = OTHER; note = 2'-O-methyl guanosine phosphorothioate
  modified_base 2: mod_base = OTHER; note = 2'-O-methyl uridine phosphorothioate
  modified_base 3: mod_base = OTHER; note = 2'-O-methyl adenosine phosphorothioate
  modified_base 123: mod_base = OTHER; note = cytidine phosphorothioate
  modified_base 124: mod_base = OTHER; note = 2'-O-methyl cytidine phosphorothioate
  modified_base 125: mod_base = OTHER; note = 2'-O-methyl guanosine phosphorothioate
  modified_base 126: mod_base = OTHER; note = 2'-O-methyl uridine
gtaacggcagacttctcctcgttttagagctagaaatagcaagttaaaataaggctagtccgttatcaacttgaaaaagtggcaccgagtcggtgcgcacctgactcctgtggagaagtctgccgt

SEQ ID NO: 20771 - RNA, 125 nt, synthetic construct
  source 1..125: mol_type = other RNA
  modified_base 1: mod_base = OTHER; note = 2'-O-methyl guanosine phosphorothioate
  modified_base 2: mod_base = OTHER; note = 2'-O-methyl uridine phosphorothioate
  modified_base 3: mod_base = OTHER; note = 2'-O-methyl adenosine phosphorothioate
  modified_base 122: mod_base = OTHER; note = guanosine phosphorothioate
  modified_base 123: mod_base = OTHER; note = 2'-O-methyl cytidine phosphorothioate
  modified_base 124: mod_base = OTHER; note = 2'-O-methyl cytidine phosphorothioate
  modified_base 125: mod_base = OTHER; note = 2'-O-methyl guanosine
gtaacggcagacttctcctcgttttagagctagaaatagcaagttaaaataaggctagtccgttatcaacttgaaaaagtggcaccgagtcggtgcgcacctgactcctgtggagaagtctgccg

SEQ ID NO: 20772 - RNA, 124 nt, synthetic construct
  source 1..124: mol_type = other RNA
  modified_base 1: mod_base = OTHER; note = 2'-O-methyl guanosine phosphorothioate
  modified_base 2: mod_base = OTHER; note = 2'-O-methyl uridine phosphorothioate
  modified_base 3: mod_base = OTHER; note = 2'-O-methyl adenosine phosphorothioate
  modified_base 121: mod_base = OTHER; note = uridine phosphorothioate
  modified_base 122: mod_base = OTHER; note = 2'-O-methyl guanosine phosphorothioate
  modified_base 123: mod_base = OTHER; note = 2'-O-methyl cytidine phosphorothioate
  modified_base 124: mod_base = OTHER; note = 2'-O-methyl cytidine
gtaacggcagacttctcctcgttttagagctagaaatagcaagttaaaataaggctagtccgttatcaacttgaaaaagtggcaccgagtcggtgcgcacctgactcctgtggagaagtctgcc

SEQ ID NO: 20773 - RNA, 123 nt, synthetic construct
  source 1..123: mol_type = other RNA
  modified_base 1: mod_base = OTHER; note = 2'-O-methyl guanosine phosphorothioate
  modified_base 2: mod_base = OTHER; note = 2'-O-methyl uridine phosphorothioate
  modified_base 3: mod_base = OTHER; note = 2'-O-methyl adenosine phosphorothioate
  modified_base 120: mod_base = OTHER; note = cytidine phosphorothioate
  modified_base 121: mod_base = OTHER; note = 2'-O-methyl uridine phosphorothioate
  modified_base 122: mod_base = OTHER; note = 2'-O-methyl guanosine phosphorothioate
  modified_base 123: mod_base = OTHER; note = 2'-O-methyl cytidine
gtaacggcagacttctcctcgttttagagctagaaatagcaagttaaaataaggctagtccgttatcaacttgaaaaagtggcaccgagtcggtgcgcacctgactcctgtggagaagtctgc

SEQ ID NO: 20774 - RNA, 122 nt, synthetic construct
  source 1..122: mol_type = other RNA
  modified_base 1: mod_base = OTHER; note = 2'-O-methyl guanosine phosphorothioate
  modified_base 2: mod_base = OTHER; note = 2'-O-methyl uridine phosphorothioate
  modified_base 3: mod_base = OTHER; note = 2'-O-methyl adenosine phosphorothioate
  modified_base 119: mod_base = OTHER; note = uridine phosphorothioate
  modified_base 120: mod_base = OTHER; note = 2'-O-methyl cytidine phosphorothioate
  modified_base 121: mod_base = OTHER; note = 2'-O-methyl uridine phosphorothioate
  modified_base 122: mod_base = OTHER; note = 2'-O-methyl guanosine
gtaacggcagacttctcctcgttttagagctagaaatagcaagttaaaataaggctagtccgttatcaacttgaaaaagtggcaccgagtcggtgcgcacctgactcctgtggagaagtctg

SEQ ID NO: 20775 - RNA, 121 nt, synthetic construct
  source 1..121: mol_type = other RNA
  modified_base 1: mod_base = OTHER; note = 2'-O-methyl guanosine phosphorothioate
  modified_base 2: mod_base = OTHER; note = 2'-O-methyl uridine phosphorothioate
  modified_base 3: mod_base = OTHER; note = 2'-O-methyl adenosine phosphorothioate
  modified_base 118: mod_base = OTHER; note = guanosine phosphorothioate
  modified_base 119: mod_base = OTHER; note = 2'-O-methyl uridine phosphorothioate
  modified_base 120: mod_base = OTHER; note = 2'-O-methyl cytidine phosphorothioate
  modified_base 121: mod_base = OTHER; note = 2'-O-methyl uridine
gtaacggcagacttctcctcgttttagagctagaaatagcaagttaaaataaggctagtccgttatcaacttgaaaaagtggcaccgagtcggtgcgcacctgactcctgtggagaagtct

SEQ ID NO: 20776 - RNA, 120 nt, synthetic construct
  source 1..120: mol_type = other RNA
  modified_base 1: mod_base = OTHER; note = 2'-O-methyl guanosine phosphorothioate
  modified_base 2: mod_base = OTHER; note = 2'-O-methyl uridine phosphorothioate
  modified_base 3: mod_base = OTHER; note = 2'-O-methyl adenosine phosphorothioate
  modified_base 117: mod_base = OTHER; note = adenosine phosphorothioate
  modified_base 118: mod_base = OTHER; note = 2'-O-methyl guanosine phosphorothioate
  modified_base 119: mod_base = OTHER; note = 2'-O-methyl uridine phosphorothioate
  modified_base 120: mod_base = OTHER; note = 2'-O-methyl cytidine
gtaacggcagacttctcctcgttttagagctagaaatagcaagttaaaataaggctagtccgttatcaacttgaaaaagtggcaccgagtcggtgcgcacctgactcctgtggagaagtc

SEQ ID NO: 20777 - RNA, 127 nt, synthetic construct
  source 1..127: mol_type = other RNA
  modified_base 1: mod_base = OTHER; note = 2'-O-methyl guanosine phosphorothioate
  modified_base 2: mod_base = OTHER; note = 2'-O-methyl uridine phosphorothioate
  modified_base 3: mod_base = OTHER; note = 2'-O-methyl adenosine phosphorothioate
  modified_base 124: mod_base = OTHER; note = uridine phosphorothioate
  modified_base 125: mod_base = OTHER; note = 2'-O-methyl uridine phosphorothioate
  modified_base 126: mod_base = OTHER; note = 2'-O-methyl adenosine phosphorothioate
  modified_base 127: mod_base = OTHER; note = 2'-O-methyl cytidine
gtaacggcagacttctcctcgttttagagctagaaatagcaagttaaaataaggctagtccgttatcaacttgaaaaagtggcaccgagtcggtgcacctgactcctgtggagaagtctgccgttac

SEQ ID NO: 20778 - RNA, 126 nt, synthetic construct
  source 1..126: mol_type = other RNA
  modified_base 1: mod_base = OTHER; note = 2'-O-methyl guanosine phosphorothioate
  modified_base 2: mod_base = OTHER; note = 2'-O-methyl uridine phosphorothioate
  modified_base 3: mod_base = OTHER; note = 2'-O-methyl adenosine phosphorothioate
  modified_base 123: mod_base = OTHER; note = guanosine phosphorothioate
  modified_base 124: mod_base = OTHER; note = 2'-O-methyl uridine phosphorothioate
  modified_base 125: mod_base = OTHER; note = 2'-O-methyl uridine phosphorothioate
  modified_base 126: mod_base = OTHER; note = 2'-O-methyl adenosine
gtaacggcagacttctcctcgttttagagctagaaatagcaagttaaaataaggctagtccgttatcaacttgaaaaagtggcaccgagtcggtgcacctgactcctgtggagaagtctgccgtta

SEQ ID NO: 20779 - RNA, 125 nt, synthetic construct
  source 1..125: mol_type = other RNA
  modified_base 1: mod_base = OTHER; note = 2'-O-methyl guanosine phosphorothioate
  modified_base 2: mod_base = OTHER; note = 2'-O-methyl uridine phosphorothioate
  modified_base 3: mod_base = OTHER; note = 2'-O-methyl adenosine phosphorothioate
  modified_base 122: mod_base = OTHER; note = cytidine phosphorothioate
  modified_base 123: mod_base = OTHER; note = 2'-O-methyl guanosine phosphorothioate
  modified_base 124: mod_base = OTHER; note = 2'-O-methyl uridine phosphorothioate
  modified_base 125: mod_base = OTHER; note = 2'-O-methyl uridine
gtaacggcagacttctcctcgttttagagctagaaatagcaagttaaaataaggctagtccgttatcaacttgaaaaagtggcaccgagtcggtgcacctgactcctgtggagaagtctgccgtt

SEQ ID NO: 20780 - RNA, 124 nt, synthetic construct
  source 1..124: mol_type = other RNA
  modified_base 1: mod_base = OTHER; note = 2'-O-methyl guanosine phosphorothioate
  modified_base 2: mod_base = OTHER; note = 2'-O-methyl uridine phosphorothioate
  modified_base 3: mod_base = OTHER; note = 2'-O-methyl adenosine phosphorothioate
  modified_base 121: mod_base = OTHER; note = cytidine phosphorothioate
  modified_base 122: mod_base = OTHER; note = 2'-O-methyl cytidine phosphorothioate
  modified_base 123: mod_base = OTHER; note = 2'-O-methyl guanosine phosphorothioate
  modified_base 124: mod_base = OTHER; note = 2'-O-methyl uridine
gtaacggcagacttctcctcgttttagagctagaaatagcaagttaaaataaggctagtccgttatcaacttgaaaaagtggcaccgagtcggtgcacctgactcctgtggagaagtctgccgt

SEQ ID NO: 20781 - RNA, 123 nt, synthetic construct
  source 1..123: mol_type = other RNA
  modified_base 1: mod_base = OTHER; note = 2'-O-methyl guanosine phosphorothioate
  modified_base 2: mod_base = OTHER; note = 2'-O-methyl uridine phosphorothioate
  modified_base 3: mod_base = OTHER; note = 2'-O-methyl adenosine phosphorothioate
  modified_base 120: mod_base = OTHER; note = guanosine phosphorothioate
  modified_base 121: mod_base = OTHER; note = 2'-O-methyl cytidine phosphorothioate
  modified_base 122: mod_base = OTHER; note = 2'-O-methyl cytidine phosphorothioate
  modified_base 123: mod_base = OTHER; note = 2'-O-methyl guanosine
gtaacggcagacttctcctcgttttagagctagaaatagcaagttaaaataaggctagtccgttatcaacttgaaaaagtggcaccgagtcggtgcacctgactcctgtggagaagtctgccg

SEQ ID NO: 20782 - RNA, 122 nt, synthetic construct
  source 1..122: mol_type = other RNA
  modified_base 1: mod_base = OTHER; note = 2'-O-methyl guanosine phosphorothioate
  modified_base 2: mod_base = OTHER; note = 2'-O-methyl uridine phosphorothioate
  modified_base 3: mod_base = OTHER; note = 2'-O-methyl adenosine phosphorothioate
  modified_base 119: mod_base = OTHER; note = uridine phosphorothioate
  modified_base 120: mod_base = OTHER; note = 2'-O-methyl guanosine phosphorothioate
  modified_base 121: mod_base = OTHER; note = 2'-O-methyl cytidine phosphorothioate
  modified_base 122: mod_base = OTHER; note = 2'-O-methyl cytidine
gtaacggcagacttctcctcgttttagagctagaaatagcaagttaaaataaggctagtccgttatcaacttgaaaaagtggcaccgagtcggtgcacctgactcctgtggagaagtctgcc

SEQ ID NO: 20783 - RNA, 121 nt, synthetic construct
  source 1..121: mol_type = other RNA
  modified_base 1: mod_base = OTHER; note = 2'-O-methyl guanosine phosphorothioate
  modified_base 2: mod_base = OTHER; note = 2'-O-methyl uridine phosphorothioate
  modified_base 3: mod_base = OTHER; note = 2'-O-methyl adenosine phosphorothioate
  modified_base 118: mod_base = OTHER; note = cytidine phosphorothioate
  modified_base 119: mod_base = OTHER; note = 2'-O-methyl uridine phosphorothioate
  modified_base 120: mod_base = OTHER; note = 2'-O-methyl guanosine phosphorothioate
  modified_base 121: mod_base = OTHER; note = 2'-O-methyl cytidine
gtaacggcagacttctcctcgttttagagctagaaatagcaagttaaaataaggctagtccgttatcaacttgaaaaagtggcaccgagtcggtgcacctgactcctgtggagaagtctgc

SEQ ID NO: 20784 - RNA, 120 nt, synthetic construct
  source 1..120: mol_type = other RNA
  modified_base 1: mod_base = OTHER; note = 2'-O-methyl guanosine phosphorothioate
  modified_base 2: mod_base = OTHER; note = 2'-O-methyl uridine phosphorothioate
  modified_base 3: mod_base = OTHER; note = 2'-O-methyl adenosine phosphorothioate
  modified_base 117: mod_base = OTHER; note = uridine phosphorothioate
  modified_base 118: mod_base = OTHER; note = 2'-O-methyl cytidine phosphorothioate
  modified_base 119: mod_base = OTHER; note = 2'-O-methyl uridine phosphorothioate
  modified_base 120: mod_base = OTHER; note = 2'-O-methyl guanosine
gtaacggcagacttctcctcgttttagagctagaaatagcaagttaaaataaggctagtccgttatcaacttgaaaaagtggcaccgagtcggtgcacctgactcctgtggagaagtctg

SEQ ID NO: 20785 - RNA, 119 nt, synthetic construct
  source 1..119: mol_type = other RNA
  modified_base 1: mod_base = OTHER; note = 2'-O-methyl guanosine phosphorothioate
  modified_base 2: mod_base = OTHER; note = 2'-O-methyl uridine phosphorothioate
  modified_base 3: mod_base = OTHER; note = 2'-O-methyl adenosine phosphorothioate
  modified_base 116: mod_base = OTHER; note = guanosine phosphorothioate
  modified_base 117: mod_base = OTHER; note = 2'-O-methyl uridine phosphorothioate
  modified_base 118: mod_base = OTHER; note = 2'-O-methyl cytidine phosphorothioate
  modified_base 119: mod_base = OTHER; note = 2'-O-methyl uridine
gtaacggcagacttctcctcgttttagagctagaaatagcaagttaaaataaggctagtccgttatcaacttgaaaaagtggcaccgagtcggtgcacctgactcctgtggagaagtct

SEQ ID NO: 20786 - RNA, 118 nt, synthetic construct
  source 1..118: mol_type = other RNA
  modified_base 1: mod_base = OTHER; note = 2'-O-methyl guanosine phosphorothioate
  modified_base 2: mod_base = OTHER; note = 2'-O-methyl uridine phosphorothioate
  modified_base 3: mod_base = OTHER; note = 2'-O-methyl adenosine phosphorothioate
  modified_base 115: mod_base = OTHER; note = adenosine phosphorothioate
  modified_base 116: mod_base = OTHER; note = 2'-O-methyl guanosine phosphorothioate
  modified_base 117: mod_base = OTHER; note = 2'-O-methyl uridine phosphorothioate
  modified_base 118: mod_base = OTHER; note = 2'-O-methyl cytidine
gtaacggcagacttctcctcgttttagagctagaaatagcaagttaaaataaggctagtccgttatcaacttgaaaaagtggcaccgagtcggtgcacctgactcctgtggagaagtc

SEQ ID NO: 20787 - RNA, 124 nt, synthetic construct
  source 1..124: mol_type = other RNA
  modified_base 1: mod_base = OTHER; note = 2'-O-methyl guanosine phosphorothioate
  modified_base 2: mod_base = OTHER; note = 2'-O-methyl uridine phosphorothioate
  modified_base 3: mod_base = OTHER; note = 2'-O-methyl adenosine phosphorothioate
  modified_base 121: mod_base = OTHER; note = uridine phosphorothioate
  modified_base 122: mod_base = OTHER; note = 2'-O-methyl uridine phosphorothioate
  modified_base 123: mod_base = OTHER; note = 2'-O-methyl adenosine phosphorothioate
  modified_base 124: mod_base = OTHER; note = 2'-O-methyl cytidine
gtaacggcagacttctcctcgttttagagctagaaatagcaagttaaaataaggctagtccgttatcaacttgaaaaagtggcaccgagtcggtgctgactcctgtggagaagtctgccgttac

SEQ ID NO: 20788 - RNA, 123 nt, synthetic construct
  source 1..123: mol_type = other RNA
  modified_base 1: mod_base = OTHER; note = 2'-O-methyl guanosine phosphorothioate
  modified_base 2: mod_base = OTHER; note = 2'-O-methyl uridine phosphorothioate
  modified_base 3: mod_base = OTHER; note = 2'-O-methyl adenosine phosphorothioate
  modified_base 120: mod_base = OTHER; note = guanosine phosphorothioate
  modified_base 121: mod_base = OTHER; note = 2'-O-methyl uridine phosphorothioate
  modified_base 122: mod_base = OTHER; note = 2'-O-methyl uridine phosphorothioate
  modified_base 123: mod_base = OTHER; note = 2'-O-methyl adenosine
gtaacggcagacttctcctcgttttagagctagaaatagcaagttaaaataaggctagtccgttatcaacttgaaaaagtggcaccgagtcggtgctgactcctgtggagaagtctgccgtta

SEQ ID NO: 20789 - RNA, 122 nt, synthetic construct
  source 1..122: mol_type = other RNA
  modified_base 1: mod_base = OTHER; note = 2'-O-methyl guanosine phosphorothioate
  modified_base 2: mod_base = OTHER; note = 2'-O-methyl uridine phosphorothioate
  modified_base 3: mod_base = OTHER; note = 2'-O-methyl adenosine phosphorothioate
  modified_base 119: mod_base = OTHER; note = cytidine phosphorothioate
  modified_base 120: mod_base = OTHER; note = 2'-O-methyl guanosine phosphorothioate
  modified_base 121: mod_base = OTHER; note = 2'-O-methyl uridine phosphorothioate
  modified_base 122: mod_base = OTHER; note = 2'-O-methyl uridine
gtaacggcagacttctcctcgttttagagctagaaatagcaagttaaaataaggctagtccgttatcaacttgaaaaagtggcaccgagtcggtgctgactcctgtggagaagtctgccgtt

SEQ ID NO: 20790 - RNA, 121 nt, synthetic construct
  source 1..121: mol_type = other RNA
  modified_base 1: mod_base = OTHER; note = 2'-O-methyl guanosine phosphorothioate
  modified_base 2: mod_base = OTHER; note = 2'-O-methyl uridine phosphorothioate
  modified_base 3: mod_base = OTHER; note = 2'-O-methyl adenosine phosphorothioate
  modified_base 118: mod_base = OTHER; note = cytidine phosphorothioate
  modified_base 119: mod_base = OTHER; note = 2'-O-methyl cytidine phosphorothioate
  modified_base 120: mod_base = OTHER; note = 2'-O-methyl guanosine phosphorothioate
  modified_base 121: mod_base = OTHER; note = 2'-O-methyl uridine
gtaacggcagacttctcctcgttttagagctagaaatagcaagttaaaataaggctagtccgttatcaacttgaaaaagtggcaccgagtcggtgctgactcctgtggagaagtctgccgt

SEQ ID NO: 20791 - RNA, 120 nt, synthetic construct
  source 1..120: mol_type = other RNA
  modified_base 1: mod_base = OTHER; note = 2'-O-methyl guanosine phosphorothioate
  modified_base 2: mod_base = OTHER; note = 2'-O-methyl uridine phosphorothioate
  modified_base 3: mod_base = OTHER; note = 2'-O-methyl adenosine phosphorothioate
  modified_base 117: mod_base = OTHER; note = guanosine phosphorothioate
  modified_base 118: mod_base = OTHER; note = 2'-O-methyl cytidine phosphorothioate
  modified_base 119: mod_base = OTHER; note = 2'-O-methyl cytidine phosphorothioate
  modified_base 120: mod_base = OTHER; note = 2'-O-methyl guanosine
gtaacggcagacttctcctcgttttagagctagaaatagcaagttaaaataaggctagtccgttatcaacttgaaaaagtggcaccgagtcggtgctgactcctgtggagaagtctgccg

SEQ ID NO: 20792 - RNA, 119 nt, synthetic construct
  source 1..119: mol_type = other RNA
  modified_base 1: mod_base = OTHER; note = 2'-O-methyl guanosine phosphorothioate
  modified_base 2: mod_base = OTHER; note = 2'-O-methyl uridine phosphorothioate
  modified_base 3: mod_base = OTHER; note = 2'-O-methyl adenosine phosphorothioate
  modified_base 116: mod_base = OTHER; note = uridine phosphorothioate
  modified_base 117: mod_base = OTHER; note = 2'-O-methyl guanosine phosphorothioate
  modified_base 118: mod_base = OTHER; note = 2'-O-methyl cytidine phosphorothioate
  modified_base 119: mod_base = OTHER; note = 2'-O-methyl cytidine
gtaacggcagacttctcctcgttttagagctagaaatagcaagttaaaataaggctagtccgttatcaacttgaaaaagtggcaccgagtcggtgctgactcctgtggagaagtctgcc

SEQ ID NO: 20793 - RNA, 118 nt, synthetic construct
  source 1..118: mol_type = other RNA
  modified_base 1: mod_base = OTHER; note = 2'-O-methyl guanosine phosphorothioate
  modified_base 2: mod_base = OTHER; note = 2'-O-methyl uridine phosphorothioate
  modified_base 3: mod_base = OTHER; note = 2'-O-methyl adenosine phosphorothioate
  modified_base 115: mod_base = OTHER; note = cytidine phosphorothioate
  modified_base 116: mod_base = OTHER; note = 2'-O-methyl uridine phosphorothioate
  modified_base 117: mod_base = OTHER; note = 2'-O-methyl guanosine phosphorothioate
  modified_base 118: mod_base = OTHER; note = 2'-O-methyl cytidine
gtaacggcagacttctcctcgttttagagctagaaatagcaagttaaaataaggctagtccgttatcaacttgaaaaagtggcaccgagtcggtgctgactcctgtggagaagtctgc

SEQ ID NO: 20794 - RNA, 117 nt, synthetic construct
  source 1..117: mol_type = other RNA
  modified_base 1: mod_base = OTHER; note = 2'-O-methyl guanosine phosphorothioate
  modified_base 2: mod_base = OTHER; note = 2'-O-methyl uridine phosphorothioate
  modified_base 3: mod_base = OTHER; note = 2'-O-methyl adenosine phosphorothioate
  modified_base 114: mod_base = OTHER; note = uridine phosphorothioate
  modified_base 115: mod_base = OTHER; note = 2'-O-methyl cytidine phosphorothioate
  modified_base 116: mod_base = OTHER; note = 2'-O-methyl uridine phosphorothioate
  modified_base 117: mod_base = OTHER; note = 2'-O-methyl guanosine
gtaacggcagacttctcctcgttttagagctagaaatagcaagttaaaataaggctagtccgttatcaacttgaaaaagtggcaccgagtcggtgctgactcctgtggagaagtctg

SEQ ID NO: 20795 - RNA, 116 nt, synthetic construct
  source 1..116: mol_type = other RNA
  modified_base 1: mod_base = OTHER; note = 2'-O-methyl guanosine phosphorothioate
  modified_base 2: mod_base = OTHER; note = 2'-O-methyl uridine phosphorothioate
  modified_base 3: mod_base = OTHER; note = 2'-O-methyl adenosine phosphorothioate
  modified_base 113: mod_base = OTHER; note = guanosine phosphorothioate
  modified_base 114: mod_base = OTHER; note = 2'-O-methyl uridine phosphorothioate
  modified_base 115: mod_base = OTHER; note = 2'-O-methyl cytidine phosphorothioate
  modified_base 116: mod_base = OTHER; note = 2'-O-methyl uridine
gtaacggcagacttctcctcgttttagagctagaaatagcaagttaaaataaggctagtccgttatcaacttgaaaaagtggcaccgagtcggtgctgactcctgtggagaagtct

SEQ ID NO: 20796 - RNA, 115 nt, synthetic construct
  source 1..115: mol_type = other RNA
  modified_base 1: mod_base = OTHER; note = 2'-O-methyl guanosine phosphorothioate
  modified_base 2: mod_base = OTHER; note = 2'-O-methyl uridine phosphorothioate
  modified_base 3: mod_base = OTHER; note = 2'-O-methyl adenosine phosphorothioate
  modified_base 112: mod_base = OTHER; note = adenosine phosphorothioate
  modified_base 113: mod_base = OTHER; note = 2'-O-methyl guanosine phosphorothioate
  modified_base 114: mod_base = OTHER; note = 2'-O-methyl uridine phosphorothioate
  modified_base 115: mod_base = OTHER; note = 2'-O-methyl cytidine
gtaacggcagacttctcctcgttttagagctagaaatagcaagttaaaataaggctagtccgttatcaacttgaaaaagtggcaccgagtcggtgctgactcctgtggagaagtc

SEQ ID NO: 20797 - RNA, 123 nt, synthetic construct
  source 1..123: mol_type = other RNA
  modified_base 1: mod_base = OTHER; note = 2'-O-methyl guanosine phosphorothioate
  modified_base 2: mod_base = OTHER; note = 2'-O-methyl uridine phosphorothioate
  modified_base 3: mod_base = OTHER; note = 2'-O-methyl adenosine phosphorothioate
  modified_base 120: mod_base = OTHER; note = uridine phosphorothioate
  modified_base 121: mod_base = OTHER; note = 2'-O-methyl uridine phosphorothioate
  modified_base 122: mod_base = OTHER; note = 2'-O-methyl adenosine phosphorothioate
  modified_base 123: mod_base = OTHER; note = 2'-O-methyl cytidine
gtaacggcagacttctcctcgttttagagctagaaatagcaagttaaaataaggctagtccgttatcaacttgaaaaagtggcaccgagtcggtgcgactcctgtggagaagtctgccgttac

SEQ ID NO: 20798 - RNA, 122 nt, synthetic construct
  source 1..122: mol_type = other RNA
  modified_base 1: mod_base = OTHER; note = 2'-O-methyl guanosine phosphorothioate
  modified_base 2: mod_base = OTHER; note = 2'-O-methyl uridine phosphorothioate
  modified_base 3: mod_base = OTHER; note = 2'-O-methyl adenosine phosphorothioate
  modified_base 119: mod_base = OTHER; note = guanosine phosphorothioate
  modified_base 120: mod_base = OTHER; note = 2'-O-methyl uridine phosphorothioate
  modified_base 121: mod_base = OTHER; note = 2'-O-methyl uridine phosphorothioate
  modified_base 122: mod_base = OTHER; note = 2'-O-methyl adenosine
gtaacggcagacttctcctcgttttagagctagaaatagcaagttaaaataaggctagtccgttatcaacttgaaaaagtggcaccgagtcggtgcgactcctgtggagaagtctgccgtta

SEQ ID NO: 20799 - RNA, 121 nt, synthetic construct
  source 1..121: mol_type = other RNA
  modified_base 1: mod_base = OTHER; note = 2'-O-methyl guanosine phosphorothioate
  modified_base 2: mod_base = OTHER; note = 2'-O-methyl uridine phosphorothioate
  modified_base 3: mod_base = OTHER; note = 2'-O-methyl adenosine phosphorothioate
  modified_base 118: mod_base = OTHER; note = cytidine phosphorothioate
  modified_base 119: mod_base = OTHER; note = 2'-O-methyl guanosine phosphorothioate
  modified_base 120: mod_base = OTHER; note = 2'-O-methyl uridine phosphorothioate
  modified_base 121: mod_base = OTHER; note = 2'-O-methyl uridine
gtaacggcagacttctcctcgttttagagctagaaatagcaagttaaaataaggctagtccgttatcaacttgaaaaagtggcaccgagtcggtgcgactcctgtggagaagtctgccgtt

SEQ ID NO: 20800 - RNA, 120 nt, synthetic construct
  source 1..120: mol_type = other RNA
  modified_base 1: mod_base = OTHER; note = 2'-O-methyl guanosine phosphorothioate
  modified_base 2: mod_base = OTHER; note = 2'-O-methyl uridine phosphorothioate
  modified_base 3: mod_base = OTHER; note = 2'-O-methyl adenosine phosphorothioate
  modified_base 117: mod_base = OTHER; note = cytidine phosphorothioate
  modified_base 118: mod_base = OTHER; note = 2'-O-methyl cytidine phosphorothioate
  modified_base 119: mod_base = OTHER; note = 2'-O-methyl guanosine phosphorothioate
  modified_base 120: mod_base = OTHER; note = 2'-O-methyl uridine
gtaacggcagacttctcctcgttttagagctagaaatagcaagttaaaataaggctagtccgttatcaacttgaaaaagtggcaccgagtcggtgcgactcctgtggagaagtctgccgt

SEQ ID NO: 20801 - RNA, 119 nt, synthetic construct
  source 1..119: mol_type = other RNA
  modified_base 1: mod_base = OTHER; note = 2'-O-methyl guanosine phosphorothioate
  modified_base 2: mod_base = OTHER; note = 2'-O-methyl uridine phosphorothioate
  modified_base 3: mod_base = OTHER; note = 2'-O-methyl adenosine phosphorothioate
  modified_base 116: mod_base = OTHER; note = guanosine phosphorothioate
  modified_base 117: mod_base = OTHER; note = 2'-O-methyl cytidine phosphorothioate
  modified_base 118: mod_base = OTHER; note = 2'-O-methyl cytidine phosphorothioate
  modified_base 119: mod_base = OTHER; note = 2'-O-methyl guanosine
gtaacggcagacttctcctcgttttagagctagaaatagcaagttaaaataaggctagtccgttatcaacttgaaaaagtggcaccgagtcggtgcgactcctgtggagaagtctgccg

SEQ ID NO: 20802 - RNA, 118 nt, synthetic construct
  source 1..118: mol_type = other RNA
  modified_base 1: mod_base = OTHER; note = 2'-O-methyl guanosine phosphorothioate
  modified_base 2: mod_base = OTHER; note = 2'-O-methyl uridine phosphorothioate
  modified_base 3: mod_base = OTHER; note = 2'-O-methyl adenosine phosphorothioate
  modified_base 115: mod_base = OTHER; note = uridine phosphorothioate
  modified_base 116: mod_base = OTHER; note = 2'-O-methyl guanosine phosphorothioate
  modified_base 117: mod_base = OTHER; note = 2'-O-methyl cytidine phosphorothioate
  modified_base 118: mod_base = OTHER; note = 2'-O-methyl cytidine
gtaacggcagacttctcctcgttttagagctagaaatagcaagttaaaataaggctagtccgttatcaacttgaaaaagtggcaccgagtcggtgcgactcctgtggagaagtctgcc

SEQ ID NO: 20803 - RNA, 117 nt, synthetic construct
  source 1..117: mol_type = other RNA
  modified_base 1: mod_base = OTHER; note = 2'-O-methyl guanosine phosphorothioate
  modified_base 2: mod_base = OTHER; note = 2'-O-methyl uridine phosphorothioate
  modified_base 3: mod_base = OTHER; note = 2'-O-methyl adenosine phosphorothioate
  modified_base 114: mod_base = OTHER; note = cytidine phosphorothioate
  modified_base 115: mod_base = OTHER; note = 2'-O-methyl uridine phosphorothioate
  modified_base 116: mod_base = OTHER; note = 2'-O-methyl guanosine phosphorothioate
  modified_base 117: mod_base = OTHER; note = 2'-O-methyl cytidine
gtaacggcagacttctcctcgttttagagctagaaatagcaagttaaaataaggctagtccgttatcaacttgaaaaagtggcaccgagtcggtgcgactcctgtggagaagtctgc

SEQ ID NO: 20804 - RNA, 116 nt, synthetic construct
  source 1..116: mol_type = other RNA
  modified_base 1: mod_base = OTHER; note = 2'-O-methyl guanosine phosphorothioate
  modified_base 2: mod_base = OTHER; note = 2'-O-methyl uridine phosphorothioate
  modified_base 3: mod_base = OTHER; note = 2'-O-methyl adenosine phosphorothioate
  modified_base 113: mod_base = OTHER; note = uridine phosphorothioate
  modified_base 114: mod_base = OTHER; note = 2'-O-methyl cytidine phosphorothioate
  modified_base 115: mod_base = OTHER; note = 2'-O-methyl uridine phosphorothioate
  modified_base 116: mod_base = OTHER; note = 2'-O-methyl guanosine
gtaacggcagacttctcctcgttttagagctagaaatagcaagttaaaataaggctagtccgttatcaacttgaaaaagtggcaccgagtcggtgcgactcctgtggagaagtctg

SEQ ID NO: 20805 - RNA, 115 nt, synthetic construct
  source 1..115: mol_type = other RNA
  modified_base 1: mod_base = OTHER; note = 2'-O-methyl guanosine phosphorothioate
  modified_base 2: mod_base = OTHER; note = 2'-O-methyl uridine phosphorothioate
  modified_base 3: mod_base = OTHER; note = 2'-O-methyl adenosine phosphorothioate
  modified_base 112: mod_base = OTHER; note = guanosine phosphorothioate
  modified_base 113: mod_base = OTHER; note = 2'-O-methyl uridine phosphorothioate
  modified_base 114: mod_base = OTHER; note = 2'-O-methyl cytidine phosphorothioate
  modified_base 115: mod_base = OTHER; note = 2'-O-methyl uridine
gtaacggcagacttctcctcgttttagagctagaaatagcaagttaaaataaggctagtccgttatcaacttgaaaaagtggcaccgagtcggtgcgactcctgtggagaagtct

SEQ ID NO: 20806 - RNA, 114 nt, synthetic construct
  source 1..114: mol_type = other RNA
  modified_base 1: mod_base = OTHER; note = 2'-O-methyl guanosine phosphorothioate
  modified_base 2: mod_base = OTHER; note = 2'-O-methyl uridine phosphorothioate
  modified_base 3: mod_base = OTHER; note = 2'-O-methyl adenosine phosphorothioate
  modified_base 111: mod_base = OTHER; note = adenosine phosphorothioate
  modified_base 112: mod_base = OTHER; note = 2'-O-methyl guanosine phosphorothioate
  modified_base 113: mod_base = OTHER; note = 2'-O-methyl uridine phosphorothioate
  modified_base 114: mod_base = OTHER; note = 2'-O-methyl cytidine
gtaacggcagacttctcctcgttttagagctagaaatagcaagttaaaataaggctagtccgttatcaacttgaaaaagtggcaccgagtcggtgcgactcctgtggagaagtc

SEQ ID NO: 20807 - RNA, 122 nt, synthetic construct
  source 1..122: mol_type = other RNA
  modified_base 1: mod_base = OTHER; note = 2'-O-methyl guanosine phosphorothioate
  modified_base 2: mod_base = OTHER; note = 2'-O-methyl uridine phosphorothioate
  modified_base 3: mod_base = OTHER; note = 2'-O-methyl adenosine phosphorothioate
  modified_base 119: mod_base = OTHER; note = uridine phosphorothioate
  modified_base 120: mod_base = OTHER; note = 2'-O-methyl uridine phosphorothioate
  modified_base 121: mod_base = OTHER; note = 2'-O-methyl adenosine phosphorothioate
  modified_base 122: mod_base = OTHER; note = 2'-O-methyl cytidine
gtaacggcagacttctcctcgttttagagctagaaatagcaagttaaaataaggctagtccgttatcaacttgaaaaagtggcaccgagtcggtgcactcctgtggagaagtctgccgttac

SEQ ID NO: 20808 - RNA, 121 nt, synthetic construct
  source 1..121: mol_type = other RNA
  modified_base 1: mod_base = OTHER; note = 2'-O-methyl guanosine phosphorothioate
  modified_base 2: mod_base = OTHER; note = 2'-O-methyl uridine phosphorothioate
  modified_base 3: mod_base = OTHER; note = 2'-O-methyl adenosine phosphorothioate
  modified_base 118: mod_base = OTHER; note = guanosine phosphorothioate
  modified_base 119: mod_base = OTHER; note = 2'-O-methyl uridine phosphorothioate
  modified_base 120: mod_base = OTHER; note = 2'-O-methyl uridine phosphorothioate
  modified_base 121: mod_base = OTHER; note = 2'-O-methyl adenosine
gtaacggcagacttctcctcgttttagagctagaaatagcaagttaaaataaggctagtccgttatcaacttgaaaaagtggcaccgagtcggtgcactcctgtggagaagtctgccgtta

SEQ ID NO: 20809 - RNA, 120 nt, synthetic construct
  source 1..120: mol_type = other RNA
  modified_base 1: mod_base = OTHER; note = 2'-O-methyl guanosine phosphorothioate
  modified_base 2: mod_base = OTHER; note = 2'-O-methyl uridine phosphorothioate
  modified_base 3: mod_base = OTHER; note = 2'-O-methyl adenosine phosphorothioate
  modified_base 117: mod_base = OTHER; note = cytidine phosphorothioate
  modified_base 118: mod_base = OTHER; note = 2'-O-methyl guanosine phosphorothioate
  modified_base 119: mod_base = OTHER; note = 2'-O-methyl uridine phosphorothioate
  modified_base 120: mod_base = OTHER; note = 2'-O-methyl uridine
gtaacggcagacttctcctcgttttagagctagaaatagcaagttaaaataaggctagtccgttatcaacttgaaaaagtggcaccgagtcggtgcactcctgtggagaagtctgccgtt

SEQ ID NO: 20810 - RNA, 119 nt, synthetic construct
  source 1..119: mol_type = other RNA
  modified_base 1: mod_base = OTHER; note = 2'-O-methyl guanosine phosphorothioate
  modified_base 2: mod_base = OTHER; note = 2'-O-methyl uridine phosphorothioate
  modified_base 3: mod_base = OTHER; note = 2'-O-methyl adenosine phosphorothioate
  modified_base 116: mod_base = OTHER; note = cytidine phosphorothioate
  modified_base 117: mod_base = OTHER; note = 2'-O-methyl cytidine phosphorothioate
  modified_base 118: mod_base = OTHER; note = 2'-O-methyl guanosine phosphorothioate
  modified_base 119: mod_base = OTHER; note = 2'-O-methyl uridine
gtaacggcagacttctcctcgttttagagctagaaatagcaagttaaaataaggctagtccgttatcaacttgaaaaagtggcaccgagtcggtgcactcctgtggagaagtctgccgt

SEQ ID NO: 20811 - RNA, 118 nt, synthetic construct
  source 1..118: mol_type = other RNA
  modified_base 1: mod_base = OTHER; note = 2'-O-methyl guanosine phosphorothioate
  modified_base 2: mod_base = OTHER; note = 2'-O-methyl uridine phosphorothioate
  modified_base 3: mod_base = OTHER; note = 2'-O-methyl adenosine phosphorothioate
  modified_base 115: mod_base = OTHER; note = guanosine phosphorothioate
  modified_base 116: mod_base = OTHER; note = 2'-O-methyl cytidine phosphorothioate
  modified_base 117: mod_base = OTHER; note = 2'-O-methyl cytidine phosphorothioate
  modified_base 118: mod_base = OTHER; note = 2'-O-methyl guanosine
gtaacggcagacttctcctcgttttagagctagaaatagcaagttaaaataaggctagtccgttatcaacttgaaaaagtggcaccgagtcggtgcactcctgtggagaagtctgccg

SEQ ID NO: 20812 - RNA, 117 nt, synthetic construct
  source 1..117: mol_type = other RNA
  modified_base 1: mod_base = OTHER; note = 2'-O-methyl guanosine phosphorothioate
  modified_base 2: mod_base = OTHER; note = 2'-O-methyl uridine phosphorothioate
  modified_base 3: mod_base = OTHER; note = 2'-O-methyl adenosine phosphorothioate
  modified_base 114: mod_base = OTHER; note = uridine phosphorothioate
  modified_base 115: mod_base = OTHER; note = 2'-O-methyl guanosine phosphorothioate
  modified_base 116: mod_base = OTHER; note = 2'-O-methyl cytidine phosphorothioate
  modified_base 117: mod_base = OTHER; note = 2'-O-methyl cytidine
gtaacggcagacttctcctcgttttagagctagaaatagcaagttaaaataaggctagtccgttatcaacttgaaaaagtggcaccgagtcggtgcactcctgtggagaagtctgcc

SEQ ID NO: 20813 - RNA, 116 nt, synthetic construct
  source 1..116: mol_type = other RNA
  modified_base 1: mod_base = OTHER; note = 2'-O-methyl guanosine phosphorothioate
  modified_base 2: mod_base = OTHER; note = 2'-O-methyl uridine phosphorothioate
  modified_base 3: mod_base = OTHER; note = 2'-O-methyl adenosine phosphorothioate
  modified_base 113: mod_base = OTHER; note = cytidine phosphorothioate
  modified_base 114: mod_base = OTHER; note = 2'-O-methyl uridine phosphorothioate
  modified_base 115: mod_base = OTHER; note = 2'-O-methyl guanosine phosphorothioate
  modified_base 116: mod_base = OTHER; note = 2'-O-methyl cytidine
gtaacggcagacttctcctcgttttagagctagaaatagcaagttaaaataaggctagtccgttatcaacttgaaaaagtggcaccgagtcggtgcactcctgtggagaagtctgc

SEQ ID NO: 20814 - RNA, 115 nt, synthetic construct
  source 1..115: mol_type = other RNA
  modified_base 1: mod_base = OTHER; note = 2'-O-methyl guanosine phosphorothioate
  modified_base 2: mod_base = OTHER; note = 2'-O-methyl uridine phosphorothioate
  modified_base 3: mod_base = OTHER; note = 2'-O-methyl adenosine phosphorothioate
  modified_base 112: mod_base = OTHER; note = uridine phosphorothioate
  modified_base 113: mod_base = OTHER; note = 2'-O-methyl cytidine phosphorothioate
  modified_base 114: mod_base = OTHER; note = 2'-O-methyl uridine phosphorothioate
  modified_base 115: mod_base = OTHER; note = 2'-O-methyl guanosine
gtaacggcagacttctcctcgttttagagctagaaatagcaagttaaaataaggctagtccgttatcaacttgaaaaagtggcaccgagtcggtgcactcctgtggagaagtctg

SEQ ID NO: 20815 - RNA, 114 nt, synthetic construct
  source 1..114: mol_type = other RNA
  modified_base 1: mod_base = OTHER; note = 2'-O-methyl guanosine phosphorothioate
  modified_base 2: mod_base = OTHER; note = 2'-O-methyl uridine phosphorothioate
  modified_base 3: mod_base = OTHER; note = 2'-O-methyl adenosine phosphorothioate
  modified_base 111: mod_base = OTHER; note = guanosine phosphorothioate
  modified_base 112: mod_base = OTHER; note = 2'-O-methyl uridine phosphorothioate
  modified_base 113: mod_base = OTHER; note = 2'-O-methyl cytidine phosphorothioate
  modified_base 114: mod_base = OTHER; note = 2'-O-methyl uridine
gtaacggcagacttctcctcgttttagagctagaaatagcaagttaaaataaggctagtccgttatcaacttgaaaaagtggcaccgagtcggtgcactcctgtggagaagtct

SEQ ID NO: 20816 - RNA, 113 nt, synthetic construct
  source 1..113: mol_type = other RNA
  modified_base 1: mod_base = OTHER; note = 2'-O-methyl guanosine phosphorothioate
  modified_base 2: mod_base = OTHER; note = 2'-O-methyl uridine phosphorothioate
  modified_base 3: mod_base = OTHER; note = 2'-O-methyl adenosine phosphorothioate
  modified_base 110: mod_base = OTHER; note = adenosine phosphorothioate
  modified_base 111: mod_base = OTHER; note = 2'-O-methyl guanosine phosphorothioate
  modified_base 112: mod_base = OTHER; note = 2'-O-methyl uridine phosphorothioate
  modified_base 113: mod_base = OTHER; note = 2'-O-methyl cytidine
gtaacggcagacttctcctcgttttagagctagaaatagcaagttaaaataaggctagtccgttatcaacttgaaaaagtggcaccgagtcggtgcactcctgtggagaagtc

SEQ ID NO: 20817 - RNA, 100 nt, synthetic construct
  source 1..100: mol_type = other RNA
  modified_base 1: mod_base = OTHER; note = 2'-O-methyl cytidine phosphorothioate
  modified_base 2: mod_base = OTHER; note = 2'-O-methyl uridine phosphorothioate
  modified_base 3: mod_base = OTHER; note = 2'-O-methyl uridine phosphorothioate
  modified_base 29: mod_base = OTHER; note = 2'-O-methyl guanosine
  modified_base 30: mod_base = OTHER; note = 2'-O-methyl cytidine
  modified_base 31: mod_base = OTHER; note = 2'-O-methyl uridine
  modified_base 32: mod_base = OTHER; note = 2'-O-methyl adenosine
  modified_base 33: mod_base = OTHER; note = 2'-O-methyl guanosine
  modified_base 34: mod_base = OTHER; note = 2'-O-methyl adenosine
  modified_base 35: mod_base = OTHER; note = 2'-O-methyl adenosine
  modified_base 36: mod_base = OTHER; note = 2'-O-methyl adenosine
  modified_base 37: mod_base = OTHER; note = 2'-O-methyl uridine
  modified_base 38: mod_base = OTHER; note = 2'-O-methyl adenosine
  modified_base 39: mod_base = OTHER; note = 2'-O-methyl guanosine
  modified_base 40: mod_base = OTHER; note = 2'-O-methyl cytidine
  modified_base 69: mod_base = OTHER; note = 2'-O-methyl adenosine
  modified_base 70: mod_base = OTHER; note = 2'-O-methyl cytidine
  modified_base 71: mod_base = OTHER; note = 2'-O-methyl uridine
  modified_base 72: mod_base = OTHER; note = 2'-O-methyl uridine
  modified_base 73: mod_base = OTHER; note = 2'-O-methyl guanosine
  modified_base 74: mod_base = OTHER; note = 2'-O-methyl adenosine
  modified_base 75: mod_base = OTHER; note = 2'-O-methyl adenosine
  modified_base 76: mod_base = OTHER; note = 2'-O-methyl adenosine
  modified_base 77: mod_base = OTHER; note = 2'-O-methyl adenosine
  modified_base 78: mod_base = OTHER; note = 2'-O-methyl adenosine
  modified_base 79: mod_base = OTHER; note = 2'-O-methyl guanosine
  modified_base 80: mod_base = OTHER; note = 2'-O-methyl uridine
  modified_base 81: mod_base = OTHER; note = 2'-O-methyl guanosine
  modified_base 82: mod_base = OTHER; note = 2'-O-methyl guanosine
  modified_base 83: mod_base = OTHER; note = 2'-O-methyl cytidine
  modified_base 84: mod_base = OTHER; note = 2'-O-methyl adenosine
  modified_base 85: mod_base = OTHER; note = 2'-O-methyl cytidine
  modified_base 86: mod_base = OTHER; note = 2'-O-methyl cytidine
  modified_base 87: mod_base = OTHER; note = 2'-O-methyl guanosine
  modified_base 88: mod_base = OTHER; note = 2'-O-methyl adenosine
  modified_base 89: mod_base = OTHER; note = 2'-O-methyl guanosine
  modified_base 90: mod_base = OTHER; note = 2'-O-methyl uridine
  modified_base 91: mod_base = OTHER; note = 2'-O-methyl cytidine
  modified_base 92: mod_base = OTHER; note = 2'-O-methyl guanosine
  modified_base 93: mod_base = OTHER; note = 2'-O-methyl guanosine
  modified_base 94: mod_base = OTHER; note = 2'-O-methyl uridine
  modified_base 95: mod_base = OTHER; note = 2'-O-methyl guanosine
  modified_base 96: mod_base = OTHER; note = 2'-O-methyl cytidine
  modified_base 97: mod_base = OTHER; note = 2'-O-methyl uridine phosphorothioate
  modified_base 98: mod_base = OTHER; note = 2'-O-methyl uridine phosphorothioate
  modified_base 99: mod_base = OTHER; note = 2'-O-methyl uridine phosphorothioate
  modified_base 100: mod_base = OTHER; note = 2'-O-methyl uridine
cttgccccacagggcagtaagttttagagctagaaatagcaagttaaaataaggctagtccgttatcaacttgaaaaagtggcaccgagtcggtgctttt

SEQ ID NO: 20818 - RNA, 100 nt, synthetic construct
  source 1..100: mol_type = other RNA
  modified_base 1: mod_base = OTHER; note = 2'-O-methyl uridine phosphorothioate
  modified_base 2: mod_base = OTHER; note = 2'-O-methyl guanosine phosphorothioate
  modified_base 3: mod_base = OTHER; note = 2'-O-methyl cytidine phosphorothioate
  modified_base 29: mod_base = OTHER; note = 2'-O-methyl guanosine
  modified_base 30: mod_base = OTHER; note = 2'-O-methyl cytidine
  modified_base 31: mod_base = OTHER; note = 2'-O-methyl uridine
  modified_base 32: mod_base = OTHER; note = 2'-O-methyl adenosine
  modified_base 33: mod_base = OTHER; note = 2'-O-methyl guanosine
  modified_base 34: mod_base = OTHER; note = 2'-O-methyl adenosine
  modified_base 35: mod_base = OTHER; note = 2'-O-methyl adenosine
  modified_base 36: mod_base = OTHER; note = 2'-O-methyl adenosine
  modified_base 37: mod_base = OTHER; note = 2'-O-methyl uridine
  modified_base 38: mod_base = OTHER; note = 2'-O-methyl adenosine
  modified_base 39: mod_base = OTHER; note = 2'-O-methyl guanosine
  modified_base 40: mod_base = OTHER; note = 2'-O-methyl cytidine
  modified_base 69: mod_base = OTHER; note = 2'-O-methyl adenosine
  modified_base 70: mod_base = OTHER; note = 2'-O-methyl cytidine
  modified_base 71: mod_base = OTHER; note = 2'-O-methyl uridine
  modified_base 72: mod_base = OTHER; note = 2'-O-methyl uridine
  modified_base 73: mod_base = OTHER; note = 2'-O-methyl guanosine
  modified_base 74: mod_base = OTHER; note = 2'-O-methyl adenosine
  modified_base 75: mod_base = OTHER; note = 2'-O-methyl adenosine
  modified_base 76: mod_base = OTHER; note = 2'-O-methyl adenosine
  modified_base 77: mod_base = OTHER; note = 2'-O-methyl adenosine
  modified_base 78: mod_base = OTHER; note = 2'-O-methyl adenosine
  modified_base 79: mod_base = OTHER; note = 2'-O-methyl guanosine
  modified_base 80: mod_base = OTHER; note = 2'-O-methyl uridine
  modified_base 81: mod_base = OTHER; note = 2'-O-methyl guanosine
  modified_base 82: mod_base = OTHER; note = 2'-O-methyl guanosine
  modified_base 83: mod_base = OTHER; note = 2'-O-methyl cytidine
  modified_base 84: mod_base = OTHER; note = 2'-O-methyl adenosine
  modified_base 85: mod_base = OTHER; note = 2'-O-methyl cytidine
  modified_base 86: mod_base = OTHER; note = 2'-O-methyl cytidine
  modified_base 87: mod_base = OTHER; note = 2'-O-methyl guanosine
  modified_base 88: mod_base = OTHER; note = 2'-O-methyl adenosine
  modified_base 89: mod_base = OTHER; note = 2'-O-methyl guanosine
  modified_base 90: mod_base = OTHER; note = 2'-O-methyl uridine
  modified_base 91: mod_base = OTHER; note = 2'-O-methyl cytidine
  modified_base 92: mod_base = OTHER; note = 2'-O-methyl guanosine
  modified_base 93: mod_base = OTHER; note = 2'-O-methyl guanosine
  modified_base 94: mod_base = OTHER; note = 2'-O-methyl uridine
  modified_base 95: mod_base = OTHER; note = 2'-O-methyl guanosine
  modified_base 96: mod_base = OTHER; note = 2'-O-methyl cytidine
  modified_base 97: mod_base = OTHER; note = 2'-O-methyl uridine phosphorothioate
  modified_base 98: mod_base = OTHER; note = 2'-O-methyl uridine phosphorothioate
  modified_base 99: mod_base = OTHER; note = 2'-O-methyl uridine phosphorothioate
  modified_base 100: mod_base = OTHER; note = 2'-O-methyl uridine
tgcaggagtcaggtgcaccagttttagagctagaaatagcaagttaaaataaggctagtccgttatcaacttgaaaaagtggcaccgagtcggtgctttt

SEQ ID NO: 20819 - RNA, 100 nt, synthetic construct
  source 1..100: mol_type = other RNA
  modified_base 1: mod_base = OTHER; note = 2'-O-methyl cytidine phosphorothioate
  modified_base 2: mod_base = OTHER; note = 2'-O-methyl adenosine phosphorothioate
  modified_base 3: mod_base = OTHER; note = 2'-O-methyl guanosine phosphorothioate
  modified_base 29: mod_base = OTHER; note = 2'-O-methyl guanosine
  modified_base 30: mod_base = OTHER; note = 2'-O-methyl cytidine
  modified_base 31: mod_base = OTHER; note = 2'-O-methyl uridine
  modified_base 32: mod_base = OTHER; note = 2'-O-methyl adenosine
  modified_base 33: mod_base = OTHER; note = 2'-O-methyl guanosine
  modified_base 34: mod_base = OTHER; note = 2'-O-methyl adenosine
  modified_base 35: mod_base = OTHER; note = 2'-O-methyl adenosine
  modified_base 36: mod_base = OTHER; note = 2'-O-methyl adenosine
  modified_base 37: mod_base = OTHER; note = 2'-O-methyl uridine
  modified_base 38: mod_base = OTHER; note = 2'-O-methyl adenosine
  modified_base 39: mod_base = OTHER; note = 2'-O-methyl guanosine
  modified_base 40: mod_base = OTHER; note = 2'-O-methyl cytidine
  modified_base 69: mod_base = OTHER; note = 2'-O-methyl adenosine
  modified_base 70: mod_base = OTHER; note = 2'-O-methyl cytidine
  modified_base 71: mod_base = OTHER; note = 2'-O-methyl uridine
  modified_base 72: mod_base = OTHER; note = 2'-O-methyl uridine
  modified_base 73: mod_base = OTHER; note = 2'-O-methyl guanosine
  modified_base 74: mod_base = OTHER; note = 2'-O-methyl adenosine
  modified_base 75: mod_base = OTHER; note = 2'-O-methyl adenosine
  modified_base 76: mod_base = OTHER; note = 2'-O-methyl adenosine
  modified_base 77: mod_base = OTHER; note = 2'-O-methyl adenosine
  modified_base 78: mod_base = OTHER; note = 2'-O-methyl adenosine
  modified_base 79: mod_base = OTHER; note = 2'-O-methyl guanosine
  modified_base 80: mod_base = OTHER; note = 2'-O-methyl uridine
  modified_base 81: mod_base = OTHER; note = 2'-O-methyl guanosine
  modified_base 82: mod_base = OTHER; note = 2'-O-methyl guanosine
  modified_base 83: mod_base = OTHER; note = 2'-O-methyl cytidine
  modified_base 84: mod_base = OTHER; note = 2'-O-methyl adenosine
  modified_base 85: mod_base = OTHER; note = 2'-O-methyl cytidine
  modified_base 86: mod_base = OTHER; note = 2'-O-methyl cytidine
  modified_base 87: mod_base = OTHER; note = 2'-O-methyl guanosine
  modified_base 88: mod_base = OTHER; note = 2'-O-methyl adenosine
  modified_base 89: mod_base = OTHER; note = 2'-O-methyl guanosine
  modified_base 90: mod_base = OTHER; note = 2'-O-methyl uridine
  modified_base 91: mod_base = OTHER; note = 2'-O-methyl cytidine
  modified_base 92: mod_base = OTHER; note = 2'-O-methyl guanosine
  modified_base 93: mod_base = OTHER; note = 2'-O-methyl guanosine
  modified_base 94: mod_base = OTHER; note = 2'-O-methyl uridine
  modified_base 95: mod_base = OTHER; note = 2'-O-methyl guanosine
  modified_base 96: mod_base = OTHER; note = 2'-O-methyl cytidine
  modified_base 97: mod_base = OTHER; note = 2'-O-methyl uridine phosphorothioate
  modified_base 98: mod_base = OTHER; note = 2'-O-methyl uridine phosphorothioate
  modified_base 99: mod_base = OTHER; note = 2'-O-methyl uridine phosphorothioate
  modified_base 100: mod_base = OTHER; note = 2'-O-methyl uridine
cagacttctctgcaggagtcgttttagagctagaaatagcaagttaaaataaggctagtccgttatcaacttgaaaaagtggcaccgagtcggtgctttt

SEQ ID NO: 20820 - RNA, 100 nt, synthetic construct
  source 1..100: mol_type = other RNA
  modified_base 1: mod_base = OTHER; note = 2'-O-methyl cytidine phosphorothioate
  modified_base 2: mod_base = OTHER; note = 2'-O-methyl adenosine phosphorothioate
  modified_base 3: mod_base = OTHER; note = 2'-O-methyl guanosine phosphorothioate
  modified_base 29: mod_base = OTHER; note = 2'-O-methyl guanosine
  modified_base 30: mod_base = OTHER; note = 2'-O-methyl cytidine
  modified_base 31: mod_base = OTHER; note = 2'-O-methyl uridine
  modified_base 32: mod_base = OTHER; note = 2'-O-methyl adenosine
  modified_base 33: mod_base = OTHER; note = 2'-O-methyl guanosine
  modified_base 34: mod_base = OTHER; note = 2'-O-methyl adenosine
  modified_base 35: mod_base = OTHER; note = 2'-O-methyl adenosine
  modified_base 36: mod_base = OTHER; note = 2'-O-methyl adenosine
  modified_base 37: mod_base = OTHER; note = 2'-O-methyl uridine
  modified_base 38: mod_base = OTHER; note = 2'-O-methyl adenosine
  modified_base 39: mod_base = OTHER; note = 2'-O-methyl guanosine
  modified_base 40: mod_base = OTHER; note = 2'-O-methyl cytidine
  modified_base 69: mod_base = OTHER; note = 2'-O-methyl adenosine
  modified_base 70: mod_base = OTHER; note = 2'-O-methyl cytidine
  modified_base 71: mod_base = OTHER; note = 2'-O-methyl uridine
  modified_base 72: mod_base = OTHER; note = 2'-O-methyl uridine
  modified_base 73: mod_base = OTHER; note = 2'-O-methyl guanosine
  modified_base 74: mod_base = OTHER; note = 2'-O-methyl adenosine
  modified_base 75: mod_base = OTHER; note = 2'-O-methyl adenosine
  modified_base 76: mod_base = OTHER; note = 2'-O-methyl adenosine
  modified_base 77: mod_base = OTHER; note = 2'-O-methyl adenosine
  modified_base 78: mod_base = OTHER; note = 2'-O-methyl adenosine
  modified_base 79: mod_base = OTHER; note = 2'-O-methyl guanosine
  modified_base 80: mod_base = OTHER; note = 2'-O-methyl uridine
  modified_base 81: mod_base = OTHER; note = 2'-O-methyl guanosine
  modified_base 82: mod_base = OTHER; note = 2'-O-methyl guanosine
  modified_base 83: mod_base = OTHER; note = 2'-O-methyl cytidine
  modified_base 84: mod_base = OTHER; note = 2'-O-methyl adenosine
  modified_base 85: mod_base = OTHER; note = 2'-O-methyl cytidine
  modified_base 86: mod_base = OTHER; note = 2'-O-methyl cytidine
  modified_base 87: mod_base = OTHER; note = 2'-O-methyl guanosine
  modified_base 88: mod_base = OTHER; note = 2'-O-methyl adenosine
  modified_base 89: mod_base = OTHER; note = 2'-O-methyl guanosine
  modified_base 90: mod_base = OTHER; note = 2'-O-methyl uridine
  modified_base 91: mod_base = OTHER; note = 2'-O-methyl cytidine
  modified_base 92: mod_base = OTHER; note = 2'-O-methyl guanosine
  modified_base 93: mod_base = OTHER; note = 2'-O-methyl guanosine
  modified_base 94: mod_base = OTHER; note = 2'-O-methyl uridine
  modified_base 95: mod_base = OTHER; note = 2'-O-methyl guanosine
  modified_base 96: mod_base = OTHER; note = 2'-O-methyl cytidine
  modified_base 97: mod_base = OTHER; note = 2'-O-methyl uridine phosphorothioate
  modified_base 98: mod_base = OTHER; note = 2'-O-methyl uridine phosphorothioate
  modified_base 99: mod_base = OTHER; note = 2'-O-methyl uridine phosphorothioate
  modified_base 100: mod_base = OTHER; note = 2'-O-methyl uridine
cagacttctctgccggagtcgttttagagctagaaatagcaagttaaaataaggctagtccgttatcaacttgaaaaagtggcaccgagtcggtgctttt

SEQ ID NO: 20821 - RNA, 100 nt, synthetic construct
  source 1..100: mol_type = other RNA
  modified_base 1: mod_base = OTHER; note = 2'-O-methyl guanosine phosphorothioate
  modified_base 2: mod_base = OTHER; note = 2'-O-methyl uridine phosphorothioate
  modified_base 3: mod_base = OTHER; note = 2'-O-methyl adenosine phosphorothioate
  modified_base 29: mod_base = OTHER; note = 2'-O-methyl guanosine
  modified_base 30: mod_base = OTHER; note = 2'-O-methyl cytidine
  modified_base 31: mod_base = OTHER; note = 2'-O-methyl uridine
  modified_base 32: mod_base = OTHER; note = 2'-O-methyl adenosine
  modified_base 33: mod_base = OTHER; note = 2'-O-methyl guanosine
  modified_base 34: mod_base = OTHER; note = 2'-O-methyl adenosine
  modified_base 35: mod_base = OTHER; note = 2'-O-methyl adenosine
  modified_base 36: mod_base = OTHER; note = 2'-O-methyl adenosine
  modified_base 37: mod_base = OTHER; note = 2'-O-methyl uridine
  modified_base 38: mod_base = OTHER; note = 2'-O-methyl adenosine
  modified_base 39: mod_base = OTHER; note = 2'-O-methyl guanosine
  modified_base 40: mod_base = OTHER; note = 2'-O-methyl cytidine
  modified_base 69: mod_base = OTHER; note = 2'-O-methyl adenosine
  modified_base 70: mod_base = OTHER; note = 2'-O-methyl cytidine
  modified_base 71: mod_base = OTHER; note = 2'-O-methyl uridine
  modified_base 72: mod_base = OTHER; note = 2'-O-methyl uridine
  modified_base 73: mod_base = OTHER; note = 2'-O-methyl guanosine
  modified_base 74: mod_base = OTHER; note = 2'-O-methyl adenosine
  modified_base 75: mod_base = OTHER; note = 2'-O-methyl adenosine
  modified_base 76: mod_base = OTHER; note = 2'-O-methyl adenosine
  modified_base 77: mod_base = OTHER; note = 2'-O-methyl adenosine
  modified_base 78: mod_base = OTHER; note = 2'-O-methyl adenosine
  modified_base 79: mod_base = OTHER; note = 2'-O-methyl guanosine
  modified_base 80: mod_base = OTHER; note = 2'-O-methyl uridine
  modified_base 81: mod_base = OTHER; note = 2'-O-methyl guanosine
  modified_base 82: mod_base = OTHER; note = 2'-O-methyl guanosine
  modified_base 83: mod_base = OTHER; note = 2'-O-methyl cytidine
  modified_base 84: mod_base = OTHER; note = 2'-O-methyl adenosine
  modified_base 85: mod_base = OTHER; note = 2'-O-methyl cytidine
  modified_base 86: mod_base = OTHER; note = 2'-O-methyl cytidine
  modified_base 87: mod_base = OTHER; note = 2'-O-methyl guanosine
  modified_base 88: mod_base = OTHER; note = 2'-O-methyl adenosine
  modified_base 89: mod_base = OTHER; note = 2'-O-methyl guanosine
  modified_base 90: mod_base = OTHER; note = 2'-O-methyl uridine
  modified_base 91: mod_base = OTHER; note = 2'-O-methyl cytidine
  modified_base 92: mod_base = OTHER; note = 2'-O-methyl guanosine
  modified_base 93: mod_base = OTHER; note = 2'-O-methyl guanosine
  modified_base 94: mod_base = OTHER; note = 2'-O-methyl uridine
  modified_base 95: mod_base = OTHER; note = 2'-O-methyl guanosine
  modified_base 96: mod_base = OTHER; note = 2'-O-methyl cytidine
  modified_base 97: mod_base = OTHER; note = 2'-O-methyl uridine phosphorothioate
  modified_base 98: mod_base = OTHER; note = 2'-O-methyl uridine phosphorothioate
  modified_base 99: mod_base = OTHER; note = 2'-O-methyl uridine phosphorothioate
  modified_base 100: mod_base = OTHER; note = 2'-O-methyl uridine
gtaacggcagacttctctgcgttttagagctagaaatagcaagttaaaataaggctagtccgttatcaacttgaaaaagtggcaccgagtcggtgctttt

SEQ ID NO: 20822 - RNA, 100 nt, synthetic construct
  source 1..100: mol_type = other RNA
  modified_base 1: mod_base = OTHER; note = 2'-O-methyl adenosine phosphorothioate
  modified_base 2: mod_base = OTHER; note = 2'-O-methyl adenosine phosphorothioate
  modified_base 3: mod_base = OTHER; note = 2'-O-methyl guanosine phosphorothioate
  modified_base 29: mod_base = OTHER; note = 2'-O-methyl guanosine
  modified_base 30: mod_base = OTHER; note = 2'-O-methyl cytidine
  modified_base 31: mod_base = OTHER; note = 2'-O-methyl uridine
  modified_base 32: mod_base = OTHER; note = 2'-O-methyl adenosine
  modified_base 33: mod_base = OTHER; note = 2'-O-methyl guanosine
  modified_base 34: mod_base = OTHER; note = 2'-O-methyl adenosine
  modified_base 35: mod_base = OTHER; note = 2'-O-methyl adenosine
  modified_base 36: mod_base = OTHER; note = 2'-O-methyl adenosine
  modified_base 37: mod_base = OTHER; note = 2'-O-methyl uridine
  modified_base 38: mod_base = OTHER; note = 2'-O-methyl adenosine
  modified_base 39: mod_base = OTHER; note = 2'-O-methyl guanosine
  modified_base 40: mod_base = OTHER; note = 2'-O-methyl cytidine
  modified_base 69: mod_base = OTHER; note = 2'-O-methyl adenosine
  modified_base 70: mod_base = OTHER; note = 2'-O-methyl cytidine
  modified_base 71: mod_base = OTHER; note = 2'-O-methyl uridine
  modified_base 72: mod_base = OTHER; note = 2'-O-methyl uridine
  modified_base 73: mod_base = OTHER; note = 2'-O-methyl guanosine
  modified_base 74: mod_base = OTHER; note = 2'-O-methyl adenosine
  modified_base 75: mod_base = OTHER; note = 2'-O-methyl adenosine
  modified_base 76: mod_base = OTHER; note = 2'-O-methyl adenosine
  modified_base 77: mod_base = OTHER; note = 2'-O-methyl adenosine
  modified_base 78: mod_base = OTHER; note = 2'-O-methyl adenosine
  modified_base 79: mod_base = OTHER; note = 2'-O-methyl guanosine
  modified_base 80: mod_base = OTHER; note = 2'-O-methyl uridine
  modified_base 81: mod_base = OTHER; note = 2'-O-methyl guanosine
  modified_base 82: mod_base = OTHER; note = 2'-O-methyl guanosine
  modified_base 83: mod_base = OTHER; note = 2'-O-methyl cytidine
  modified_base 84: mod_base = OTHER; note = 2'-O-methyl adenosine
  modified_base 85: mod_base = OTHER; note = 2'-O-methyl cytidine
  modified_base 86: mod_base = OTHER; note = 2'-O-methyl cytidine
  modified_base 87: mod_base = OTHER; note = 2'-O-methyl guanosine
  modified_base 88: mod_base = OTHER; note = 2'-O-methyl adenosine
  modified_base 89: mod_base = OTHER; note = 2'-O-methyl guanosine
  modified_base 90: mod_base = OTHER; note = 2'-O-methyl uridine
  modified_base 91: mod_base = OTHER; note = 2'-O-methyl cytidine
  modified_base 92: mod_base = OTHER; note = 2'-O-methyl guanosine
  modified_base 93: mod_base = OTHER; note = 2'-O-methyl guanosine
  modified_base 94: mod_base = OTHER; note = 2'-O-methyl uridine
  modified_base 95: mod_base = OTHER; note = 2'-O-methyl guanosine
  modified_base 96: mod_base = OTHER; note = 2'-O-methyl cytidine
  modified_base 97: mod_base = OTHER; note = 2'-O-methyl uridine phosphorothioate
  modified_base 98: mod_base = OTHER; note = 2'-O-methyl uridine phosphorothioate
  modified_base 99: mod_base = OTHER; note = 2'-O-methyl uridine phosphorothioate
  modified_base 100: mod_base = OTHER; note = 2'-O-methyl uridine
aagcaaatgtaagcaatagagttttagagctagaaatagcaagttaaaataaggctagtccgttatcaacttgaaaaagtggcaccgagtcggtgctttt

SEQ ID NO: 20823 - RNA, 100 nt, synthetic construct
  source 1..100: mol_type = other RNA
  modified_base 1: mod_base = OTHER; note = 2'-O-methyl cytidine phosphorothioate
  modified_base 2: mod_base = OTHER; note = 2'-O-methyl uridine phosphorothioate
  modified_base 3: mod_base = OTHER; note = 2'-O-methyl guanosine phosphorothioate
  modified_base 29: mod_base = OTHER; note = 2'-O-methyl guanosine
  modified_base 30: mod_base = OTHER; note = 2'-O-methyl cytidine
  modified_base 31: mod_base = OTHER; note = 2'-O-methyl uridine
  modified_base 32: mod_base = OTHER; note = 2'-O-methyl adenosine
  modified_base 33: mod_base = OTHER; note = 2'-O-methyl guanosine
  modified_base 34: mod_base = OTHER; note = 2'-O-methyl adenosine
  modified_base 35: mod_base = OTHER; note = 2'-O-methyl adenosine
  modified_base 36: mod_base = OTHER; note = 2'-O-methyl adenosine
  modified_base 37: mod_base = OTHER; note = 2'-O-methyl uridine
  modified_base 38: mod_base = OTHER; note = 2'-O-methyl adenosine
  modified_base 39: mod_base = OTHER; note = 2'-O-methyl guanosine
  modified_base 40: mod_base = OTHER; note = 2'-O-methyl cytidine
  modified_base 69: mod_base = OTHER; note = 2'-O-methyl adenosine
  modified_base 70: mod_base = OTHER; note = 2'-O-methyl cytidine
  modified_base 71: mod_base = OTHER; note = 2'-O-methyl uridine
  modified_base 72: mod_base = OTHER; note = 2'-O-methyl uridine
  modified_base 73: mod_base = OTHER; note = 2'-O-methyl guanosine
  modified_base 74: mod_base = OTHER; note = 2'-O-methyl adenosine
  modified_base 75: mod_base = OTHER; note = 2'-O-methyl adenosine
  modified_base 76: mod_base = OTHER; note = 2'-O-methyl adenosine
  modified_base 77: mod_base = OTHER; note = 2'-O-methyl adenosine
  modified_base 78: mod_base = OTHER; note = 2'-O-methyl adenosine
  modified_base 79: mod_base = OTHER; note = 2'-O-methyl guanosine
  modified_base 80: mod_base = OTHER; note = 2'-O-methyl uridine
  modified_base 81: mod_base = OTHER; note = 2'-O-methyl guanosine
  modified_base 82: mod_base = OTHER; note = 2'-O-methyl guanosine
  modified_base 83: mod_base = OTHER; note = 2'-O-methyl cytidine
  modified_base 84: mod_base = OTHER; note = 2'-O-methyl adenosine
  modified_base 85: mod_base = OTHER; note = 2'-O-methyl cytidine
  modified_base 86: mod_base = OTHER; note = 2'-O-methyl cytidine
  modified_base 87: mod_base = OTHER; note = 2'-O-methyl guanosine
  modified_base 88: mod_base = OTHER; note = 2'-O-methyl adenosine
  modified_base 89: mod_base = OTHER; note = 2'-O-methyl guanosine
  modified_base 90: mod_base = OTHER; note = 2'-O-methyl uridine
  modified_base 91: mod_base = OTHER; note = 2'-O-methyl cytidine
  modified_base 92: mod_base = OTHER; note = 2'-O-methyl guanosine
  modified_base 93: mod_base = OTHER; note = 2'-O-methyl guanosine
  modified_base 94: mod_base = OTHER; note = 2'-O-methyl uridine
  modified_base 95: mod_base = OTHER; note = 2'-O-methyl guanosine
  modified_base 96: mod_base = OTHER; note = 2'-O-methyl cytidine
  modified_base 97: mod_base = OTHER; note = 2'-O-methyl uridine phosphorothioate
  modified_base 98: mod_base = OTHER; note = 2'-O-methyl uridine phosphorothioate
  modified_base 99: mod_base = OTHER; note = 2'-O-methyl uridine phosphorothioate
  modified_base 100: mod_base = OTHER; note = 2'-O-methyl uridine
ctgacttttatgcccagcccgttttagagctagaaatagcaagttaaaataaggctagtccgttatcaacttgaaaaagtggcaccgagtcggtgctttt

SEQ ID NO: 20824 - RNA, 100 nt, synthetic construct; identical to SEQ ID NO: 20613
  source 1..100: mol_type = other RNA
  modified_base 1: mod_base = OTHER; note = 2'-O-methyl cytidine phosphorothioate
  modified_base 2: mod_base = OTHER; note = 2'-O-methyl cytidine phosphorothioate
  modified_base 3: mod_base = OTHER; note = 2'-O-methyl uridine phosphorothioate
  modified_base 29: mod_base = OTHER; note = 2'-O-methyl guanosine
  modified_base 30: mod_base = OTHER; note = 2'-O-methyl cytidine
  modified_base 31: mod_base = OTHER; note = 2'-O-methyl uridine
  modified_base 32: mod_base = OTHER; note = 2'-O-methyl adenosine
  modified_base 33: mod_base = OTHER; note = 2'-O-methyl guanosine
  modified_base 34: mod_base = OTHER; note = 2'-O-methyl adenosine
  modified_base 35: mod_base = OTHER; note = 2'-O-methyl adenosine
  modified_base 36: mod_base = OTHER; note = 2'-O-methyl adenosine
  modified_base 37: mod_base = OTHER; note = 2'-O-methyl uridine
  modified_base 38: mod_base = OTHER; note = 2'-O-methyl adenosine
  modified_base 39: mod_base = OTHER; note = 2'-O-methyl guanosine
  modified_base 40: mod_base = OTHER; note = 2'-O-methyl cytidine
  modified_base 69: mod_base = OTHER; note = 2'-O-methyl adenosine
  modified_base 70: mod_base = OTHER; note = 2'-O-methyl cytidine
  modified_base 71: mod_base = OTHER; note = 2'-O-methyl uridine
  modified_base 72: mod_base = OTHER; note = 2'-O-methyl uridine
  modified_base 73: mod_base = OTHER; note = 2'-O-methyl guanosine
  modified_base 74: mod_base = OTHER; note = 2'-O-methyl adenosine
  modified_base 75: mod_base = OTHER; note = 2'-O-methyl adenosine
  modified_base 76: mod_base = OTHER; note = 2'-O-methyl adenosine
  modified_base 77: mod_base = OTHER; note = 2'-O-methyl adenosine
  modified_base 78: mod_base = OTHER; note = 2'-O-methyl adenosine
  modified_base 79: mod_base = OTHER; note = 2'-O-methyl guanosine
  modified_base 80: mod_base = OTHER; note = 2'-O-methyl uridine
  modified_base 81: mod_base = OTHER; note = 2'-O-methyl guanosine
  modified_base 82: mod_base = OTHER; note = 2'-O-methyl guanosine
  modified_base 83: mod_base = OTHER; note = 2'-O-methyl cytidine
  modified_base 84: mod_base = OTHER; note = 2'-O-methyl adenosine
  modified_base 85: mod_base = OTHER; note = 2'-O-methyl cytidine
  modified_base 86: mod_base = OTHER; note = 2'-O-methyl cytidine
  modified_base 87: mod_base = OTHER; note = 2'-O-methyl guanosine
  modified_base 88: mod_base = OTHER; note = 2'-O-methyl adenosine
  modified_base 89: mod_base = OTHER; note = 2'-O-methyl guanosine
  modified_base 90: mod_base = OTHER; note = 2'-O-methyl uridine
  modified_base 91: mod_base = OTHER; note = 2'-O-methyl cytidine
  modified_base 92: mod_base = OTHER; note = 2'-O-methyl guanosine
  modified_base 93: mod_base = OTHER; note = 2'-O-methyl guanosine
  modified_base 94: mod_base = OTHER; note = 2'-O-methyl uridine
  modified_base 95: mod_base = OTHER; note = 2'-O-methyl guanosine
  modified_base 96: mod_base = OTHER; note = 2'-O-methyl cytidine
  modified_base 97: mod_base = OTHER; note = 2'-O-methyl uridine phosphorothioate
  modified_base 98: mod_base = OTHER; note = 2'-O-methyl uridine phosphorothioate
  modified_base 99: mod_base = OTHER; note = 2'-O-methyl uridine phosphorothioate
  modified_base 100: mod_base = OTHER; note = 2'-O-methyl uridine

SEQ ID NO: 20825 - RNA, 100 nt, synthetic construct
  source 1..100: mol_type = other RNA
  modified_base 1: mod_base = OTHER; note = 2'-O-methyl cytidine phosphorothioate
  modified_base 2: mod_base = OTHER; note = 2'-O-methyl adenosine phosphorothioate
  modified_base 3: mod_base = OTHER; note = 2'-O-methyl cytidine phosphorothioate
  modified_base 29: mod_base = OTHER; note = 2'-O-methyl guanosine
  modified_base 30: mod_base = OTHER; note = 2'-O-methyl cytidine
  modified_base 31: mod_base = OTHER; note = 2'-O-methyl uridine
  modified_base 32: mod_base = OTHER; note = 2'-O-methyl adenosine
  modified_base 33: mod_base = OTHER; note = 2'-O-methyl guanosine
  modified_base 34: mod_base = OTHER; note = 2'-O-methyl adenosine
  modified_base 35: mod_base = OTHER; note = 2'-O-methyl adenosine
  modified_base 36: mod_base = OTHER; note = 2'-O-methyl adenosine
  modified_base 37: mod_base = OTHER; note = 2'-O-methyl uridine
  modified_base 38: mod_base = OTHER; note = 2'-O-methyl adenosine
  modified_base 39: mod_base = OTHER; note = 2'-O-methyl guanosine
  modified_base 40: mod_base = OTHER; note = 2'-O-methyl cytidine
  modified_base 69: mod_base = OTHER; note = 2'-O-methyl adenosine
  modified_base 70: mod_base = OTHER; note = 2'-O-methyl cytidine
  modified_base 71: mod_base = OTHER; note = 2'-O-methyl uridine
  modified_base 72: mod_base = OTHER; note = 2'-O-methyl uridine
  modified_base 73: mod_base = OTHER; note = 2'-O-methyl guanosine
  modified_base 74: mod_base = OTHER; note = 2'-O-methyl adenosine
  modified_base 75: mod_base = OTHER; note = 2'-O-methyl adenosine
  modified_base 76: mod_base = OTHER; note = 2'-O-methyl adenosine
  modified_base 77: mod_base = OTHER; note = 2'-O-methyl adenosine
  modified_base 78: mod_base = OTHER; note = 2'-O-methyl adenosine
  modified_base 79: mod_base = OTHER; note = 2'-O-methyl guanosine
  modified_base 80: mod_base = OTHER; note = 2'-O-methyl uridine
  modified_base 81: mod_base = OTHER; note = 2'-O-methyl guanosine
  modified_base 82: mod_base = OTHER; note = 2'-O-methyl guanosine
  modified_base 83: mod_base = OTHER; note = 2'-O-methyl cytidine
  modified_base 84: mod_base = OTHER; note = 2'-O-methyl adenosine
  modified_base 85: mod_base = OTHER; note = 2'-O-methyl cytidine
  modified_base 86: mod_base = OTHER; note = 2'-O-methyl cytidine
  modified_base 87: mod_base = OTHER; note = 2'-O-methyl guanosine
  modified_base 88: mod_base = OTHER; note = 2'-O-methyl adenosine
  modified_base 89: mod_base = OTHER; note = 2'-O-methyl guanosine
  modified_base 90: mod_base = OTHER; note = 2'-O-methyl uridine
  modified_base 91: mod_base = OTHER; note = 2'-O-methyl cytidine
  modified_base 92: mod_base = OTHER; note = 2'-O-methyl guanosine
  modified_base 93: mod_base = OTHER; note = 2'-O-methyl guanosine
  modified_base 94: mod_base = OTHER; note = 2'-O-methyl uridine
  modified_base 95: mod_base = OTHER; note = 2'-O-methyl guanosine
  modified_base 96: mod_base = OTHER; note = 2'-O-methyl cytidine
  modified_base 97: mod_base = OTHER; note = 2'-O-methyl uridine phosphorothioate
  modified_base 98: mod_base = OTHER; note = 2'-O-methyl uridine phosphorothioate
  modified_base 99: mod_base = OTHER; note = 2'-O-methyl uridine phosphorothioate
  modified_base 100: mod_base = OTHER; note = 2'-O-methyl uridine
cacgttcaccttgccccacagttttagagctagaaatagcaagttaaaataaggctagtccgttatcaacttgaaaaagtggcaccgagtcggtgctttt

SEQ ID NO: 20826 - RNA, 100 nt, synthetic construct
  source 1..100: mol_type = other RNA
  modified_base 1: mod_base = OTHER; note = 2'-O-methyl cytidine phosphorothioate
  modified_base 2: mod_base = OTHER; note = 2'-O-methyl cytidine phosphorothioate
  modified_base 3: mod_base = OTHER; note = 2'-O-methyl adenosine phosphorothioate
  modified_base 97: mod_base = OTHER; note = 2'-O-methyl uridine phosphorothioate
  modified_base 98: mod_base = OTHER; note = 2'-O-methyl uridine phosphorothioate
  modified_base 99: mod_base = OTHER; note = 2'-O-methyl uridine phosphorothioate
ccacgttcaccttgccccacgttttagagctagaaatagcaagttaaaataaggctagtccgttatcaacttgaaaaagtggcaccgagtcggtgctttt

SEQ ID NO: 20827 - RNA, 100 nt, synthetic construct
  source 1..100: mol_type = other RNA
  modified_base 1: mod_base = OTHER; note = 2'-O-methyl adenosine phosphorothioate
  modified_base 2: mod_base = OTHER; note = 2'-O-methyl cytidine phosphorothioate
  modified_base 3: mod_base = OTHER; note = 2'-O-methyl cytidine phosphorothioate
  modified_base 97: mod_base = OTHER; note = 2'-O-methyl uridine phosphorothioate
  modified_base 98: mod_base = OTHER; note = 2'-O-methyl uridine phosphorothioate
  modified_base 99: mod_base = OTHER; note = 2'-O-methyl uridine phosphorothioate
accttgataccaacctgcccgttttagagctagaaatagcaagttaaaataaggctagtccgttatcaacttgaaaaagtggcaccgagtcggtgctttt

SEQ ID NO: 20828 - RNA, 100 nt, synthetic construct
  source 1..100: mol_type = other RNA
  modified_base 1: mod_base = OTHER; note = 2'-O-methyl uridine phosphorothioate
  modified_base 2: mod_base = OTHER; note = 2'-O-methyl cytidine phosphorothioate
  modified_base 3: mod_base = OTHER; note = 2'-O-methyl cytidine phosphorothioate
  modified_base 97: mod_base = OTHER; note = 2'-O-methyl uridine phosphorothioate
  modified_base 98: mod_base = OTHER; note = 2'-O-methyl uridine phosphorothioate
  modified_base 99: mod_base = OTHER; note = 2'-O-methyl uridine phosphorothioate
tccacatgcccagtttctatgttttagagctagaaatagcaagttaaaataaggctagtccgttatcaacttgaaaaagtggcaccgagtcggtgctttt

SEQ ID NO: 20829 - RNA, 100 nt, synthetic construct
  source 1..100: mol_type = other RNA
  modified_base 1: mod_base = OTHER; note = 2'-O-methyl cytidine phosphorothioate
  modified_base 2: mod_base = OTHER; note = 2'-O-methyl adenosine phosphorothioate
  modified_base 3: mod_base = OTHER; note = 2'-O-methyl guanosine phosphorothioate
  modified_base 29: mod_base = OTHER; note = 2'-O-methyl guanosine
  modified_base 30: mod_base = OTHER; note = 2'-O-methyl cytidine
  modified_base 31: mod_base = OTHER; note = 2'-O-methyl uridine
  modified_base 32: mod_base = OTHER; note = 2'-O-methyl adenosine
  modified_base 33: mod_base = OTHER; note = 2'-O-methyl guanosine
  modified_base 34: mod_base = OTHER; note = 2'-O-methyl adenosine
  modified_base 35: mod_base = OTHER; note = 2'-O-methyl adenosine
  modified_base 36: mod_base = OTHER; note = 2'-O-methyl adenosine
  modified_base 37: mod_base = OTHER; note = 2'-O-methyl uridine
  modified_base 38: mod_base = OTHER; note = 2'-O-methyl adenosine
  modified_base 39: mod_base = OTHER; note = 2'-O-methyl guanosine
  modified_base 40: mod_base = OTHER; note = 2'-O-methyl cytidine
  modified_base 69: mod_base = OTHER; note = 2'-O-methyl adenosine
  modified_base 70: mod_base = OTHER; note = 2'-O-methyl cytidine
  modified_base 71: mod_base = OTHER; note = 2'-O-methyl uridine
  modified_base 72: mod_base = OTHER; note = 2'-O-methyl uridine
  modified_base 73: mod_base = OTHER; note = 2'-O-methyl guanosine
  modified_base 74: mod_base = OTHER; note = 2'-O-methyl adenosine
  modified_base 75: mod_base = OTHER; note = 2'-O-methyl adenosine
  modified_base 76: mod_base = OTHER; note = 2'-O-methyl adenosine
  modified_base 77: mod_base = OTHER; note = 2'-O-methyl adenosine
  modified_base 78: mod_base = OTHER; note = 2'-O-methyl adenosine
  modified_base 79: mod_base = OTHER; note = 2'-O-methyl guanosine
  modified_base 80: mod_base = OTHER; note = 2'-O-methyl uridine
  modified_base 81: mod_base = OTHER; note = 2'-O-methyl guanosine
  modified_base 82: mod_base = OTHER; note = 2'-O-methyl guanosine
  modified_base 83: mod_base = OTHER; note = 2'-O-methyl cytidine
  modified_base 84: mod_base = OTHER; note = 2'-O-methyl adenosine
  modified_base 85: mod_base = OTHER; note = 2'-O-methyl cytidine
  modified_base 86: mod_base = OTHER; note = 2'-O-methyl cytidine
  modified_base 87: mod_base = OTHER; note = 2'-O-methyl guanosine
  modified_base 88: mod_base = OTHER; note = 2'-O-methyl adenosine
  modified_base 89: mod_base = OTHER; note = 2'-O-methyl guanosine
  modified_base 90: mod_base = OTHER; note = 2'-O-methyl uridine
  modified_base 91: mod_base = OTHER; note = 2'-O-methyl cytidine
  modified_base 92: mod_base = OTHER; note = 2'-O-methyl guanosine
  modified_base 93: mod_base = OTHER; note = 2'-O-methyl guanosine
  modified_base 94: mod_base = OTHER; note = 2'-O-methyl uridine
  modified_base 95: mod_base = OTHER; note = 2'-O-methyl guanosine
  modified_base 96: mod_base = OTHER; note = 2'-O-methyl cytidine
  modified_base 97: mod_base = OTHER; note = 2'-O-methyl uridine phosphorothioate
  modified_base 98: mod_base = OTHER; note = 2'-O-methyl uridine phosphorothioate
  modified_base 99: mod_base = OTHER; note = 2'-O-methyl uridine phosphorothioate
  modified_base 100: mod_base = OTHER; note = 2'-O-methyl uridine
cagggctgggcataaaagtcgttttagagctagaaatagcaagttaaaataaggctagtccgttatcaacttgaaaaagtggcaccgagtcggtgctttt

SEQ ID NO: 20830 - RNA, 100 nt, synthetic construct
  source 1..100: mol_type = other RNA
  modified_base 1: mod_base = OTHER; note = 2'-O-methyl adenosine phosphorothioate
  modified_base 2: mod_base = OTHER; note = 2'-O-methyl guanosine phosphorothioate
  modified_base 3: mod_base = OTHER; note = 2'-O-methyl guanosine phosphorothioate
  modified_base 29: mod_base = OTHER; note = 2'-O-methyl guanosine
  modified_base 30: mod_base = OTHER; note = 2'-O-methyl cytidine
  modified_base 31: mod_base = OTHER; note = 2'-O-methyl uridine
  modified_base 32: mod_base = OTHER; note = 2'-O-methyl adenosine
  modified_base 33: mod_base = OTHER; note = 2'-O-methyl guanosine
  modified_base 34: mod_base = OTHER; note = 2'-O-methyl adenosine
  modified_base 35: mod_base = OTHER; note = 2'-O-methyl adenosine
  modified_base 36: mod_base = OTHER; note = 2'-O-methyl adenosine
  modified_base 37: mod_base = OTHER; note = 2'-O-methyl uridine
  modified_base 38: mod_base = OTHER; note = 2'-O-methyl adenosine
  modified_base 39: mod_base = OTHER; note = 2'-O-methyl guanosine
  modified_base 40: mod_base = OTHER; note = 2'-O-methyl cytidine
  modified_base 69: mod_base = OTHER; note = 2'-O-methyl adenosine
  modified_base 70: mod_base = OTHER; note = 2'-O-methyl cytidine
  modified_base 71: mod_base = OTHER; note = 2'-O-methyl uridine
  modified_base 72: mod_base = OTHER; note = 2'-O-methyl uridine
  modified_base 73: mod_base = OTHER; note = 2'-O-methyl guanosine
  modified_base 74: mod_base = OTHER; note = 2'-O-methyl adenosine
  modified_base 75: mod_base = OTHER; note = 2'-O-methyl adenosine
  modified_base 76: mod_base = OTHER; note = 2'-O-methyl adenosine
  modified_base 77: mod_base = OTHER; note = 2'-O-methyl adenosine
  modified_base 78: mod_base = OTHER; note = 2'-O-methyl adenosine
  modified_base 79: mod_base = OTHER; note = 2'-O-methyl guanosine
  modified_base 80: mod_base = OTHER; note = 2'-O-methyl uridine
  modified_base 81: mod_base = OTHER; note = 2'-O-methyl guanosine
  modified_base 82: mod_base = OTHER; note = 2'-O-methyl guanosine
  modified_base 83: mod_base = OTHER; note = 2'-O-methyl cytidine
  modified_base 84: mod_base = OTHER; note = 2'-O-methyl adenosine
  modified_base 85: mod_base = OTHER; note = 2'-O-methyl cytidine
  modified_base 86: mod_base = OTHER; note = 2'-O-methyl cytidine
  modified_base 87: mod_base = OTHER; note = 2'-O-methyl guanosine
  modified_base 88: mod_base = OTHER; note = 2'-O-methyl adenosine
  modified_base 89: mod_base = OTHER; note = 2'-O-methyl guanosine
  modified_base 90: mod_base = OTHER; note = 2'-O-methyl uridine
  modified_base 91: mod_base = OTHER; note = 2'-O-methyl cytidine
  modified_base 92: mod_base = OTHER; note = 2'-O-methyl guanosine
  modified_base 93: mod_base = OTHER; note = 2'-O-methyl guanosine
  modified_base 94: mod_base = OTHER; note = 2'-O-methyl uridine
  modified_base 95: mod_base = OTHER; note = 2'-O-methyl guanosine
  modified_base 96: mod_base = OTHER; note = 2'-O-methyl cytidine
  modified_base 97: mod_base = OTHER; note = 2'-O-methyl uridine phosphorothioate
  modified_base 98: mod_base = OTHER; note = 2'-O-methyl uridine phosphorothioate
  modified_base 99: mod_base = OTHER; note = 2'-O-methyl uridine phosphorothioate
  modified_base 100: mod_base = OTHER; note = 2'-O-methyl uridine
agggctgggcataaaagtcagttttagagctagaaatagcaagttaaaataaggctagtccgttatcaacttgaaaaagtggcaccgagtcggtgctttt

SEQ ID NO: 20831 - RNA, 100 nt, synthetic construct
  source 1..100: mol_type = other RNA
  modified_base 1: mod_base = OTHER; note = 2'-O-methyl guanosine phosphorothioate
  modified_base 2: mod_base = OTHER; note = 2'-O-methyl cytidine phosphorothioate
  modified_base 3: mod_base = OTHER; note = 2'-O-methyl adenosine phosphorothioate
  modified_base 29: mod_base = OTHER; note = 2'-O-methyl guanosine
  modified_base 30: mod_base = OTHER; note = 2'-O-methyl cytidine
  modified_base 31: mod_base = OTHER; note = 2'-O-methyl uridine
  modified_base 32: mod_base = OTHER; note = 2'-O-methyl adenosine
  modified_base 33: mod_base = OTHER; note = 2'-O-methyl guanosine
  modified_base 34: mod_base = OTHER; note = 2'-O-methyl adenosine
  modified_base 35: mod_base = OTHER; note = 2'-O-methyl adenosine
  modified_base 36: mod_base = OTHER; note = 2'-O-methyl adenosine
  modified_base 37: mod_base = OTHER; note = 2'-O-methyl uridine
  modified_base 38: mod_base = OTHER; note = 2'-O-methyl adenosine
  modified_base 39: mod_base = OTHER; note = 2'-O-methyl guanosine
  modified_base 40: mod_base = OTHER; note = 2'-O-methyl cytidine
  modified_base 69: mod_base = OTHER; note = 2'-O-methyl adenosine
  modified_base 70: mod_base = OTHER; note = 2'-O-methyl cytidine
  modified_base 71: mod_base = OTHER; note = 2'-O-methyl uridine
  modified_base 72: mod_base = OTHER; note = 2'-O-methyl uridine
  modified_base 73: mod_base = OTHER; note = 2'-O-methyl guanosine
  modified_base 74: mod_base = OTHER; note = 2'-O-methyl adenosine
  modified_base 75: mod_base = OTHER; note = 2'-O-methyl adenosine
  modified_base 76: mod_base = OTHER; note = 2'-O-methyl adenosine
  modified_base 77: mod_base = OTHER; note = 2'-O-methyl adenosine
  modified_base 78: mod_base = OTHER; note = 2'-O-methyl adenosine
  modified_base 79: mod_base = OTHER; note = 2'-O-methyl guanosine
  modified_base 80: mod_base = OTHER; note = 2'-O-methyl uridine
  modified_base 81: mod_base = OTHER; note = 2'-O-methyl guanosine
  modified_base 82: mod_base = OTHER; note = 2'-O-methyl guanosine
  modified_base 83: mod_base = OTHER; note = 2'-O-methyl cytidine
  modified_base 84: mod_base = OTHER; note = 2'-O-methyl adenosine
  modified_base 85: mod_base = OTHER; note = 2'-O-methyl cytidine
  modified_base 86: mod_base = OTHER; note = 2'-O-methyl cytidine
  modified_base 87: mod_base = OTHER; note = 2'-O-methyl guanosine
  modified_base 88: mod_base = OTHER; note = 2'-O-methyl adenosine
  modified_base 89: mod_base = OTHER; note = 2'-O-methyl guanosine
  modified_base 90: mod_base = OTHER; note = 2'-O-methyl uridine
  modified_base 91: mod_base = OTHER; note = 2'-O-methyl cytidine
  modified_base 92: mod_base = OTHER; note = 2'-O-methyl guanosine
  modified_base 93: mod_base = OTHER; note = 2'-O-methyl guanosine
  modified_base 94: mod_base = OTHER; note = 2'-O-methyl uridine
  modified_base 95: mod_base = OTHER; note = 2'-O-methyl guanosine
  modified_base 96: mod_base = OTHER; note = 2'-O-methyl cytidine
  modified_base 97: mod_base = OTHER; note = 2'-O-methyl uridine phosphorothioate
  modified_base 98: mod_base = OTHER; note = 2'-O-methyl uridine phosphorothioate
  modified_base 99: mod_base = OTHER; note = 2'-O-methyl uridine phosphorothioate
  modified_base 100: mod_base = OTHER; note = 2'-O-methyl uridine
gcaacctcaaacagacaccagttttagagctagaaatagcaagttaaaataaggctagtccgttatcaacttgaaaaagtggcaccgagtcggtgctttt

SEQ ID NO: 20832 - RNA, 100 nt, synthetic construct
  source 1..100: mol_type = other RNA
  modified_base 1: mod_base = OTHER; note = 2'-O-methyl guanosine phosphorothioate
  modified_base 2: mod_base = OTHER; note = 2'-O-methyl guanosine phosphorothioate
  modified_base 3: mod_base = OTHER; note = 2'-O-methyl adenosine phosphorothioate
  modified_base 29: mod_base = OTHER; note = 2'-O-methyl guanosine
  modified_base 30: mod_base = OTHER; note = 2'-O-methyl cytidine
  modified_base 31: mod_base = OTHER; note = 2'-O-methyl uridine
  modified_base 32: mod_base = OTHER; note = 2'-O-methyl adenosine
  modified_base 33: mod_base = OTHER; note = 2'-O-methyl guanosine
  modified_base 34: mod_base = OTHER; note = 2'-O-methyl adenosine
  modified_base 35: mod_base = OTHER; note = 2'-O-methyl adenosine
  modified_base 36: mod_base = OTHER; note = 2'-O-methyl adenosine
  modified_base 37: mod_base = OTHER; note = 2'-O-methyl uridine
  modified_base 38: mod_base = OTHER; note = 2'-O-methyl adenosine
  modified_base 39: mod_base = OTHER; note = 2'-O-methyl guanosine
  modified_base 40: mod_base = OTHER; note = 2'-O-methyl cytidine
  modified_base 69: mod_base = OTHER; note = 2'-O-methyl adenosine
  modified_base 70: mod_base = OTHER; note = 2'-O-methyl cytidine
  modified_base 71: mod_base = OTHER; note = 2'-O-methyl uridine
  modified_base 72: mod_base = OTHER; note = 2'-O-methyl uridine
  modified_base 73: mod_base = OTHER; note = 2'-O-methyl guanosine
  modified_base 74: mod_base = OTHER; note = 2'-O-methyl adenosine
  modified_base 75: mod_base = OTHER; note = 2'-O-methyl adenosine
  modified_base 76: mod_base = OTHER; note = 2'-O-methyl adenosine
  modified_base 77: mod_base = OTHER; note = 2'-O-methyl adenosine
  modified_base 78: mod_base = OTHER; note = 2'-O-methyl adenosine
  modified_base 79: mod_base = OTHER; note = 2'-O-methyl guanosine
  modified_base 80: mod_base = OTHER; note = 2'-O-methyl uridine
  modified_base 81: mod_base = OTHER; note = 2'-O-methyl guanosine
  modified_base 82: mod_base = OTHER; note = 2'-O-methyl guanosine
  modified_base 83: mod_base = OTHER; note = 2'-O-methyl cytidine
  modified_base 84: mod_base = OTHER; note = 2'-O-methyl adenosine
  modified_base 85: mod_base = OTHER; note = 2'-O-methyl cytidine
  modified_base 86: mod_base = OTHER; note = 2'-O-methyl cytidine
  modified_base 87: mod_base = OTHER; note = 2'-O-methyl guanosine
  modified_base 88: mod_base = OTHER; note = 2'-O-methyl adenosine
  modified_base 89: mod_base = OTHER; note = 2'-O-methyl guanosine
  modified_base 90: mod_base = OTHER; note = 2'-O-methyl uridine
  modified_base 91: mod_base = OTHER; note = 2'-O-methyl cytidine
  modified_base 92: mod_base = OTHER; note = 2'-O-methyl guanosine
  modified_base 93: mod_base = OTHER; note = 2'-O-methyl guanosine
  modified_base 94: mod_base = OTHER; note = 2'-O-methyl uridine
  modified_base 95: mod_base = OTHER; note = 2'-O-methyl guanosine
  modified_base 96: mod_base = OTHER; note = 2'-O-methyl cytidine
  modified_base 97: mod_base = OTHER; note = 2'-O-methyl uridine phosphorothioate
  modified_base 98: mod_base = OTHER; note = 2'-O-methyl uridine phosphorothioate
  modified_base 99: mod_base = OTHER; note = 2'-O-methyl uridine phosphorothioate
  modified_base 100: mod_base = OTHER; note = 2'-O-methyl uridine
ggagggcaggagccagggctgttttagagctagaaatagcaagttaaaataaggctagtccgttatcaacttgaaaaagtggcaccgagtcggtgctttt

SEQ ID NO: 20833 - RNA, 100 nt, synthetic construct
  source 1..100: mol_type = other RNA
  modified_base 1: mod_base = OTHER; note = 2'-O-methyl guanosine phosphorothioate
  modified_base 2: mod_base = OTHER; note = 2'-O-methyl uridine phosphorothioate
  modified_base 3: mod_base = OTHER; note = 2'-O-methyl cytidine phosphorothioate
  modified_base 29: mod_base = OTHER; note = 2'-O-methyl guanosine
  modified_base 30: mod_base = OTHER; note = 2'-O-methyl cytidine
  modified_base 31: mod_base = OTHER; note = 2'-O-methyl uridine
  modified_base 32: mod_base = OTHER; note = 2'-O-methyl adenosine
  modified_base 33: mod_base = OTHER; note = 2'-O-methyl guanosine
  modified_base 34: mod_base = OTHER; note = 2'-O-methyl adenosine
  modified_base 35: mod_base = OTHER; note = 2'-O-methyl adenosine
  modified_base 36: mod_base = OTHER; note = 2'-O-methyl adenosine
  modified_base 37: mod_base = OTHER; note = 2'-O-methyl uridine
  modified_base 38: mod_base = OTHER; note = 2'-O-methyl adenosine
  modified_base 39: mod_base = OTHER; note = 2'-O-methyl guanosine
  modified_base 40: mod_base = OTHER; note = 2'-O-methyl cytidine
  modified_base 69: mod_base = OTHER; note = 2'-O-methyl adenosine
  modified_base 70: mod_base = OTHER; note = 2'-O-methyl cytidine
  modified_base 71: mod_base = OTHER; note = 2'-O-methyl uridine
  modified_base 72: mod_base = OTHER; note = 2'-O-methyl uridine
  modified_base 73: mod_base = OTHER; note = 2'-O-methyl guanosine
  modified_base 74: mod_base = OTHER; note = 2'-O-methyl adenosine
  modified_base 75: mod_base = OTHER; note = 2'-O-methyl adenosine
  modified_base 76: mod_base = OTHER; note = 2'-O-methyl adenosine
  modified_base 77: mod_base = OTHER; note = 2'-O-methyl adenosine
  modified_base 78: mod_base = OTHER; note = 2'-O-methyl adenosine
  modified_base 79: mod_base = OTHER; note = 2'-O-methyl guanosine
  modified_base 80: mod_base = OTHER; note = 2'-O-methyl uridine
  modified_base 81: mod_base = OTHER; note = 2'-O-methyl guanosine
  modified_base 82: mod_base = OTHER; note = 2'-O-methyl guanosine
  modified_base 83: mod_base = OTHER; note = 2'-O-methyl cytidine
  modified_base 84: mod_base = OTHER; note = 2'-O-methyl adenosine
  modified_base 85: mod_base = OTHER; note = 2'-O-methyl cytidine
  modified_base 86: mod_base = OTHER; note = 2'-O-methyl cytidine
  modified_base 87: mod_base = OTHER; note = 2'-O-methyl guanosine
  modified_base 88: mod_base = OTHER; note = 2'-O-methyl adenosine
  modified_base 89: mod_base = OTHER; note = 2'-O-methyl guanosine
  modified_base 90: mod_base = OTHER; note = 2'-O-methyl uridine
  modified_base 91: mod_base = OTHER; note = 2'-O-methyl cytidine
  modified_base 92: mod_base = OTHER; note = 2'-O-methyl guanosine
  modified_base 93: mod_base = OTHER; note = 2'-O-methyl guanosine
  modified_base 94: mod_base = OTHER; note = 2'-O-methyl uridine
  modified_base 95: mod_base = OTHER; note = 2'-O-methyl guanosine
  modified_base 96: mod_base = OTHER; note = 2'-O-methyl cytidine
  modified_base 97: mod_base = OTHER; note = 2'-O-methyl uridine phosphorothioate
  modified_base 98: mod_base = OTHER; note = 2'-O-methyl uridine phosphorothioate
  modified_base 99: mod_base = OTHER; note = 2'-O-methyl uridine phosphorothioate
  modified_base 100: mod_base = OTHER; note = 2'-O-methyl uridine
gtctgccgttactgccctgtgttttagagctagaaatagcaagttaaaataaggctagtccgttatcaacttgaaaaagtggcaccgagtcggtgctttt

SEQ ID NO: 20834 - RNA, 100 nt, synthetic construct
  source 1..100: mol_type = other RNA
  modified_base 1: mod_base = OTHER; note = 2'-O-methyl cytidine phosphorothioate
  modified_base 2: mod_base = OTHER; note = 2'-O-methyl guanosine phosphorothioate
  modified_base 3: mod_base = OTHER; note = 2'-O-methyl uridine phosphorothioate
  modified_base 29: mod_base = OTHER; note = 2'-O-methyl guanosine
  modified_base 30: mod_base = OTHER; note = 2'-O-methyl cytidine
  modified_base 31: mod_base = OTHER; note = 2'-O-methyl uridine
  modified_base 32: mod_base = OTHER; note = 2'-O-methyl adenosine
  modified_base 33: mod_base = OTHER; note = 2'-O-methyl guanosine
  modified_base 34: mod_base = OTHER; note = 2'-O-methyl adenosine
  modified_base 35: mod_base = OTHER; note = 2'-O-methyl adenosine
  modified_base 36: mod_base = OTHER; note = 2'-O-methyl adenosine
  modified_base 37: mod_base = OTHER; note = 2'-O-methyl uridine
  modified_base 38: mod_base = OTHER; note = 2'-O-methyl adenosine
  modified_base 39: mod_base = OTHER; note = 2'-O-methyl guanosine
  modified_base 40: mod_base = OTHER; note = 2'-O-methyl cytidine
  modified_base 69: mod_base = OTHER; note = 2'-O-methyl adenosine
  modified_base 70: mod_base = OTHER; note = 2'-O-methyl cytidine
  modified_base 71: mod_base = OTHER; note = 2'-O-methyl uridine
  modified_base 72: mod_base = OTHER; note = 2'-O-methyl uridine
  modified_base 73: mod_base = OTHER; note = 2'-O-methyl guanosine
  modified_base 74: mod_base = OTHER; note = 2'-O-methyl adenosine
  modified_base 75: mod_base = OTHER; note = 2'-O-methyl adenosine
  modified_base 76: mod_base = OTHER; note = 2'-O-methyl adenosine
  modified_base 77: mod_base = OTHER; note = 2'-O-methyl adenosine
  modified_base 78: mod_base = OTHER; note = 2'-O-methyl adenosine
  modified_base 79: mod_base = OTHER; note = 2'-O-methyl guanosine
  modified_base 80: mod_base = OTHER; note = 2'-O-methyl uridine
  modified_base 81: mod_base = OTHER; note = 2'-O-methyl guanosine
  modified_base 82: mod_base = OTHER; note = 2'-O-methyl guanosine
  modified_base 83: mod_base = OTHER; note = 2'-O-methyl cytidine
  modified_base 84: mod_base = OTHER; note = 2'-O-methyl adenosine
  modified_base 85: mod_base = OTHER; note = 2'-O-methyl cytidine
  modified_base 86: mod_base = OTHER; note = 2'-O-methyl cytidine
  modified_base 87: mod_base = OTHER; note = 2'-O-methyl guanosine
  modified_base 88: mod_base = OTHER; note = 2'-O-methyl adenosine
  modified_base 89: mod_base = OTHER; note = 2'-O-methyl guanosine
  modified_base 90: mod_base = OTHER; note = 2'-O-methyl uridine
  modified_base 91: mod_base = OTHER; note = 2'-O-methyl cytidine
  modified_base 92: mod_base = OTHER; note = 2'-O-methyl guanosine
  modified_base 93: mod_base = OTHER; note = 2'-O-methyl guanosine
  modified_base 94: mod_base = OTHER; note = 2'-O-methyl uridine
  modified_base 95: mod_base = OTHER; note = 2'-O-methyl guanosine
  modified_base 96: mod_base = OTHER; note = 2'-O-methyl cytidine
  modified_base 97: mod_base = OTHER; note = 2'-O-methyl uridine phosphorothioate
  modified_base 98: mod_base = OTHER; note = 2'-O-methyl uridine phosphorothioate
  modified_base 99: mod_base = OTHER; note = 2'-O-methyl uridine phosphorothioate
  modified_base 100: mod_base = OTHER; note = 2'-O-methyl uridine
cgttactgccctgtggggcagttttagagctagaaatagcaagttaaaataaggctagtccgttatcaacttgaaaaagtggcaccgagtcggtgctttt

SEQ ID NO: 20835 - RNA, 100 nt, synthetic construct
  source 1..100: mol_type = other RNA
  modified_base 1: mod_base = OTHER; note = 2'-O-methyl cytidine phosphorothioate
  modified_base 2: mod_base = OTHER; note = 2'-O-methyl cytidine phosphorothioate
  modified_base 3: mod_base = OTHER; note = 2'-O-methyl uridine phosphorothioate
  modified_base 29: mod_base = OTHER; note = 2'-O-methyl guanosine
  modified_base 30: mod_base = OTHER; note = 2'-O-methyl cytidine
  modified_base 31: mod_base = OTHER; note = 2'-O-methyl uridine
  modified_base 32: mod_base = OTHER; note = 2'-O-methyl adenosine
  modified_base 33: mod_base = OTHER; note = 2'-O-methyl guanosine
  modified_base 34: mod_base = OTHER; note = 2'-O-methyl adenosine
  modified_base 35: mod_base = OTHER; note = 2'-O-methyl adenosine
  modified_base 36: mod_base = OTHER; note = 2'-O-methyl adenosine
  modified_base 37: mod_base = OTHER; note = 2'-O-methyl uridine
  modified_base 38: mod_base = OTHER; note = 2'-O-methyl adenosine
  modified_base 39: mod_base = OTHER; note = 2'-O-methyl guanosine
  modified_base 40: mod_base = OTHER; note = 2'-O-methyl cytidine
  modified_base 69: mod_base = OTHER; note = 2'-O-methyl adenosine
  modified_base 70: mod_base = OTHER; note = 2'-O-methyl cytidine
  modified_base 71: mod_base = OTHER; note = 2'-O-methyl uridine
  modified_base 72: mod_base = OTHER; note = 2'-O-methyl uridine
  modified_base 73: mod_base = OTHER; note = 2'-O-methyl guanosine
  modified_base 74: mod_base = OTHER; note = 2'-O-methyl adenosine
  modified_base 75: mod_base = OTHER; note = 2'-O-methyl adenosine
  modified_base 76: mod_base = OTHER; note = 2'-O-methyl adenosine
  modified_base 77: mod_base = OTHER; note = 2'-O-methyl adenosine
  modified_base 78: mod_base = OTHER; note = 2'-O-methyl adenosine
  modified_base 79: mod_base = OTHER; note = 2'-O-methyl guanosine
  modified_base 80: mod_base = OTHER; note = 2'-O-methyl uridine
  modified_base 81: mod_base = OTHER; note = 2'-O-methyl guanosine
  modified_base 82: mod_base = OTHER; note = 2'-O-methyl guanosine
  modified_base 83: mod_base = OTHER; note = 2'-O-methyl cytidine
  modified_base 84: mod_base = OTHER; note = 2'-O-methyl adenosine
  modified_base 85: mod_base = OTHER; note = 2'-O-methyl cytidine
  modified_base 86: mod_base = OTHER; note = 2'-O-methyl cytidine
  modified_base 87: mod_base = OTHER; note = 2'-O-methyl guanosine
  modified_base 88: mod_base = OTHER; note = 2'-O-methyl adenosine
  modified_base 89: mod_base = OTHER; note = 2'-O-methyl guanosine
  modified_base 90: mod_base = OTHER; note = 2'-O-methyl uridine
  modified_base 91: mod_base = OTHER; note = 2'-O-methyl cytidine
  modified_base 92: mod_base = OTHER; note = 2'-O-methyl guanosine
  modified_base 93: mod_base = OTHER; note = 2'-O-methyl guanosine
  modified_base 94: mod_base = OTHER; note = 2'-O-methyl uridine
  modified_base 95: mod_base = OTHER; note = 2'-O-methyl guanosine
  modified_base 96: mod_base = OTHER; note = 2'-O-methyl cytidine
  modified_base 97: mod_base = OTHER; note = 2'-O-methyl uridine phosphorothioate
  modified_base 98: mod_base = OTHER; note = 2'-O-methyl uridine phosphorothioate
  modified_base 99: mod_base = OTHER; note = 2'-O-methyl uridine phosphorothioate
  modified_base 100: mod_base = OTHER; note = 2'-O-methyl uridine
cctgtggggcaaggtgaacggttttagagctagaaatagcaagttaaaataaggctagtccgttatcaacttgaaaaagtggcaccgagtcggtgctttt

SEQ ID NO: 20836 - RNA, 100 nt, synthetic construct
  source 1..100: mol_type = other RNA
  modified_base 1: mod_base = OTHER; note = 2'-O-methyl adenosine phosphorothioate
  modified_base 2: mod_base = OTHER; note = 2'-O-methyl adenosine phosphorothioate
  modified_base 3: mod_base = OTHER; note = 2'-O-methyl guanosine phosphorothioate
  modified_base 29: mod_base = OTHER; note = 2'-O-methyl guanosine
  modified_base 30: mod_base = OTHER; note = 2'-O-methyl cytidine
  modified_base 31: mod_base = OTHER; note = 2'-O-methyl uridine
  modified_base 32: mod_base = OTHER; note = 2'-O-methyl adenosine
  modified_base 33: mod_base = OTHER; note = 2'-O-methyl guanosine
  modified_base 34: mod_base = OTHER; note = 2'-O-methyl adenosine
  modified_base 35: mod_base = OTHER; note = 2'-O-methyl adenosine
  modified_base 36: mod_base = OTHER; note = 2'-O-methyl adenosine
  modified_base 37: mod_base = OTHER; note = 2'-O-methyl uridine
  modified_base 38: mod_base = OTHER; note = 2'-O-methyl adenosine
  modified_base 39: mod_base = OTHER; note = 2'-O-methyl guanosine
  modified_base 40: mod_base = OTHER; note = 2'-O-methyl cytidine
  modified_base 69: mod_base = OTHER; note = 2'-O-methyl adenosine
  modified_base 70: mod_base = OTHER; note = 2'-O-methyl cytidine
  modified_base 71: mod_base = OTHER; note = 2'-O-methyl uridine
  modified_base 72: mod_base = OTHER; note = 2'-O-methyl uridine
  modified_base 73: mod_base = OTHER; note = 2'-O-methyl guanosine
  modified_base 74: mod_base = OTHER; note = 2'-O-methyl adenosine
  modified_base 75: mod_base = OTHER; note = 2'-O-methyl adenosine
  modified_base 76: mod_base = OTHER; note = 2'-O-methyl adenosine
  modified_base 77: mod_base = OTHER; note = 2'-O-methyl adenosine
  modified_base 78: mod_base = OTHER; note = 2'-O-methyl adenosine
  modified_base 79: mod_base = OTHER; note = 2'-O-methyl guanosine
  modified_base 80: mod_base = OTHER; note = 2'-O-methyl uridine
  modified_base 81: mod_base = OTHER; note = 2'-O-methyl guanosine
  modified_base 82: mod_base = OTHER; note = 2'-O-methyl guanosine
  modified_base 83: mod_base = OTHER; note = 2'-O-methyl cytidine
  modified_base 84: mod_base = OTHER; note = 2'-O-methyl adenosine
  modified_base 85: mod_base = OTHER; note = 2'-O-methyl cytidine
  modified_base 86: mod_base = OTHER; note = 2'-O-methyl cytidine
  modified_base 87: mod_base = OTHER; note = 2'-O-methyl guanosine
  modified_base 88: mod_base = OTHER; note = 2'-O-methyl adenosine
  modified_base 89: mod_base = OTHER; note = 2'-O-methyl guanosine
  modified_base 90: mod_base = OTHER; note = 2'-O-methyl uridine
  modified_base 91: mod_base = OTHER; note = 2'-O-methyl cytidine
  modified_base 92: mod_base = OTHER; note = 2'-O-methyl guanosine
  modified_base 93: mod_base = OTHER; note = 2'-O-methyl guanosine
  modified_base 94: mod_base = OTHER; note = 2'-O-methyl uridine
  modified_base 95: mod_base = OTHER; note = 2'-O-methyl guanosine
  modified_base 96: mod_base = OTHER; note = 2'-O-methyl cytidine
  modified_base 97: mod_base = OTHER; note = 2'-O-methyl uridine phosphorothioate
  modified_base 98: mod_base = OTHER; note = 2'-O-methyl uridine phosphorothioate
  modified_base 99: mod_base = OTHER; note = 2'-O-methyl uridine phosphorothioate
  modified_base 100: mod_base = OTHER; note = 2'-O-methyl uridine
aaggtgaacgtggatgaagtgttttagagctagaaatagcaagttaaaataaggctagtccgttatcaacttgaaaaagtggcaccgagtcggtgctttt

SEQ ID NO: 20837 - RNA, 100 nt, synthetic construct
  source 1..100: mol_type = other RNA
  modified_base 1: mod_base = OTHER; note = 2'-O-methyl uridine phosphorothioate
  modified_base 2: mod_base = OTHER; note = 2'-O-methyl guanosine phosphorothioate
  modified_base 3: mod_base = OTHER; note = 2'-O-methyl adenosine phosphorothioate
  modified_base 29: mod_base = OTHER; note = 2'-O-methyl guanosine
  modified_base 30: mod_base = OTHER; note = 2'-O-methyl cytidine
  modified_base 31: mod_base = OTHER; note = 2'-O-methyl uridine
  modified_base 32: mod_base = OTHER; note = 2'-O-methyl adenosine
  modified_base 33: mod_base = OTHER; note = 2'-O-methyl guanosine
  modified_base 34: mod_base = OTHER; note = 2'-O-methyl adenosine
  modified_base 35: mod_base = OTHER; note = 2'-O-methyl adenosine
  modified_base 36: mod_base = OTHER; note = 2'-O-methyl adenosine
  modified_base 37: mod_base = OTHER; note = 2'-O-methyl uridine
  modified_base 38: mod_base = OTHER; note = 2'-O-methyl adenosine
  modified_base 39: mod_base = OTHER; note = 2'-O-methyl guanosine
  modified_base 40: mod_base = OTHER; note = 2'-O-methyl cytidine
  modified_base 69: mod_base = OTHER; note = 2'-O-methyl adenosine
  modified_base 70: mod_base = OTHER; note = 2'-O-methyl cytidine
  modified_base 71: mod_base = OTHER; note = 2'-O-methyl uridine
  modified_base 72: mod_base = OTHER; note = 2'-O-methyl uridine
  modified_base 73: mod_base = OTHER; note = 2'-O-methyl guanosine
  modified_base 74: mod_base = OTHER; note = 2'-O-methyl adenosine
  modified_base 75: mod_base = OTHER; note = 2'-O-methyl adenosine
  modified_base 76: mod_base = OTHER; note = 2'-O-methyl adenosine
  modified_base 77: mod_base = OTHER; note = 2'-O-methyl adenosine
  modified_base 78: mod_base = OTHER; note = 2'-O-methyl adenosine
  modified_base 79: mod_base = OTHER; note = 2'-O-methyl guanosine
  modified_base 80: mod_base = OTHER; note = 2'-O-methyl uridine
  modified_base 81: mod_base = OTHER; note = 2'-O-methyl guanosine
  modified_base 82: mod_base = OTHER; note = 2'-O-methyl guanosine
  modified_base 83: mod_base = OTHER; note = 2'-O-methyl cytidine
  modified_base 84: mod_base = OTHER; note = 2'-O-methyl adenosine
  modified_base 85: mod_base = OTHER; note = 2'-O-methyl cytidine
  modified_base 86: mod_base = OTHER; note = 2'-O-methyl cytidine
  modified_base 87: mod_base = OTHER; note = 2'-O-methyl guanosine
  modified_base 88: mod_base = OTHER; note = 2'-O-methyl adenosine
  modified_base 89: mod_base = OTHER; note = 2'-O-methyl guanosine
  modified_base 90: mod_base = OTHER; note = 2'-O-methyl uridine
  modified_base 91: mod_base = OTHER; note = 2'-O-methyl cytidine
  modified_base 92: mod_base = OTHER; note = 2'-O-methyl guanosine
  modified_base 93: mod_base = OTHER; note = 2'-O-methyl guanosine
  modified_base 94: mod_base = OTHER; note = 2'-O-methyl uridine
  modified_base 95: mod_base = OTHER; note = 2'-O-methyl guanosine
  modified_base 96: mod_base = OTHER; note = 2'-O-methyl cytidine
  modified_base 97: mod_base = OTHER; note = 2'-O-methyl uridine phosphorothioate
  modified_base 98: mod_base = OTHER; note = 2'-O-methyl uridine phosphorothioate
  modified_base 99: mod_base = OTHER; note = 2'-O-methyl uridine phosphorothioate
  modified_base 100: mod_base = OTHER; note = 2'-O-methyl uridine
tgaagttggtggtgaggcccgttttagagctagaaatagcaagttaaaataaggctagtccgttatcaacttgaaaaagtggcaccgagtcggtgctttt

SEQ ID NO: 20838 - RNA, 100 nt, synthetic construct
  source 1..100: mol_type = other RNA
  modified_base 1: mod_base = OTHER; note = 2'-O-methyl uridine phosphorothioate
  modified_base 2: mod_base = OTHER; note = 2'-O-methyl guanosine phosphorothioate
  modified_base 3: mod_base = OTHER; note = 2'-O-methyl guanosine phosphorothioate
  modified_base 29: mod_base = OTHER; note = 2'-O-methyl guanosine
  modified_base 30: mod_base = OTHER; note = 2'-O-methyl cytidine
  modified_base 31: mod_base = OTHER; note = 2'-O-methyl uridine
  modified_base 32: mod_base = OTHER; note = 2'-O-methyl adenosine
  modified_base 33: mod_base = OTHER; note = 2'-O-methyl guanosine
  modified_base 34: mod_base = OTHER; note = 2'-O-methyl adenosine
  modified_base 35: mod_base = OTHER; note = 2'-O-methyl adenosine
  modified_base 36: mod_base = OTHER; note = 2'-O-methyl adenosine
  modified_base 37: mod_base = OTHER; note = 2'-O-methyl uridine
  modified_base 38: mod_base = OTHER; note = 2'-O-methyl adenosine
  modified_base 39: mod_base = OTHER; note = 2'-O-methyl guanosine
  modified_base 40: mod_base = OTHER; note = 2'-O-methyl cytidine
  modified_base 69: mod_base = OTHER; note = 2'-O-methyl adenosine
  modified_base 70: mod_base = OTHER; note = 2'-O-methyl cytidine
  modified_base 71: mod_base = OTHER; note = 2'-O-methyl uridine
  modified_base 72: mod_base = OTHER; note = 2'-O-methyl uridine
  modified_base 73: mod_base = OTHER; note = 2'-O-methyl guanosine
  modified_base 74: mod_base = OTHER; note = 2'-O-methyl adenosine
  modified_base 75: mod_base = OTHER; note = 2'-O-methyl adenosine
  modified_base 76: mod_base = OTHER; note = 2'-O-methyl adenosine
  modified_base 77: mod_base = OTHER; note = 2'-O-methyl adenosine
  modified_base 78: mod_base = OTHER; note = 2'-O-methyl adenosine
  modified_base 79: mod_base = OTHER; note = 2'-O-methyl guanosine
  modified_base 80: mod_base = OTHER; note = 2'-O-methyl uridine
  modified_base 81: mod_base = OTHER; note = 2'-O-methyl guanosine
  modified_base 82: mod_base = OTHER; note = 2'-O-methyl guanosine
  modified_base 83: mod_base = OTHER; note = 2'-O-methyl cytidine
  modified_base 84: mod_base = OTHER; note = 2'-O-methyl adenosine
  modified_base 85: mod_base = OTHER; note = 2'-O-methyl cytidine
  modified_base 86: mod_base = OTHER; note = 2'-O-methyl cytidine
  modified_base 87: mod_base = OTHER; note = 2'-O-methyl guanosine
  modified_base 88: mod_base = OTHER; note = 2'-O-methyl adenosine
  modified_base 89: mod_base = OTHER; note = 2'-O-methyl guanosine
  modified_base 90: mod_base = OTHER; note = 2'-O-methyl uridine
  modified_base 91: mod_base = OTHER; note = 2'-O-methyl cytidine
  modified_base 92: mod_base = OTHER; note = 2'-O-methyl guanosine
  modified_base 93: mod_base = OTHER; note = 2'-O-methyl guanosine
  modified_base 94: mod_base = OTHER; note = 2'-O-methyl uridine
  modified_base 95: mod_base = OTHER; note = 2'-O-methyl guanosine
  modified_base 96: mod_base = OTHER; note = 2'-O-methyl cytidine
  modified_base 97: mod_base = OTHER; note = 2'-O-methyl uridine phosphorothioate
  modified_base 98: mod_base = OTHER; note = 2'-O-methyl uridine phosphorothioate
  modified_base 99: mod_base = OTHER; note = 2'-O-methyl uridine phosphorothioate
  modified_base 100: mod_base = OTHER; note = 2'-O-methyl uridine
tggtgaggccctgggcaggtgttttagagctagaaatagcaagttaaaataaggctagtccgttatcaacttgaaaaagtggcaccgagtcggtgctttt

SEQ ID NO: 20839 - RNA, 100 nt, synthetic construct
  source 1..100: mol_type = other RNA
  modified_base 1: mod_base = OTHER; note = 2'-O-methyl uridine phosphorothioate
  modified_base 2: mod_base = OTHER; note = 2'-O-methyl guanosine phosphorothioate
  modified_base 3: mod_base = OTHER; note = 2'-O-methyl guanosine phosphorothioate
  modified_base 29: mod_base = OTHER; note = 2'-O-methyl guanosine
  modified_base 30: mod_base = OTHER; note = 2'-O-methyl cytidine
  modified_base 31: mod_base = OTHER; note = 2'-O-methyl uridine
  modified_base 32: mod_base = OTHER; note = 2'-O-methyl adenosine
  modified_base 33: mod_base = OTHER; note = 2'-O-methyl guanosine
  modified_base 34: mod_base = OTHER; note = 2'-O-methyl adenosine
  modified_base 35: mod_base = OTHER; note = 2'-O-methyl adenosine
  modified_base 36: mod_base = OTHER; note = 2'-O-methyl adenosine
  modified_base 37: mod_base = OTHER; note = 2'-O-methyl uridine
  modified_base 38: mod_base = OTHER; note = 2'-O-methyl adenosine
  modified_base 39: mod_base = OTHER; note = 2'-O-methyl guanosine
  modified_base 40: mod_base = OTHER; note = 2'-O-methyl cytidine
  modified_base 69: mod_base = OTHER; note = 2'-O-methyl adenosine
  modified_base 70: mod_base = OTHER; note = 2'-O-methyl cytidine
  modified_base 71: mod_base = OTHER; note = 2'-O-methyl uridine
  modified_base 72: mod_base = OTHER; note = 2'-O-methyl uridine
  modified_base 73: mod_base = OTHER; note = 2'-O-methyl guanosine
  modified_base 74: mod_base = OTHER; note = 2'-O-methyl adenosine
  modified_base 75: mod_base = OTHER; note = 2'-O-methyl adenosine
  modified_base 76: mod_base = OTHER; note = 2'-O-methyl adenosine
  modified_base 77: mod_base = OTHER; note = 2'-O-methyl adenosine
  modified_base 78: mod_base = OTHER; note = 2'-O-methyl adenosine
  modified_base 79: mod_base = OTHER; note = 2'-O-methyl guanosine
  modified_base 80: mod_base = OTHER; note = 2'-O-methyl uridine
  modified_base 81: mod_base = OTHER; note = 2'-O-methyl guanosine
  modified_base 82: mod_base = OTHER; note = 2'-O-methyl guanosine
  modified_base 83: mod_base = OTHER; note = 2'-O-methyl cytidine
  modified_base 84: mod_base = OTHER; note = 2'-O-methyl adenosine
  modified_base 85: mod_base = OTHER; note = 2'-O-methyl cytidine
  modified_base 86: mod_base = OTHER; note = 2'-O-methyl cytidine
  modified_base 87: mod_base = OTHER; note = 2'-O-methyl guanosine
  modified_base 88: mod_base = OTHER; note = 2'-O-methyl adenosine
  modified_base 89: mod_base = OTHER; note = 2'-O-methyl guanosine
  modified_base 90: mod_base = OTHER; note = 2'-O-methyl uridine
  modified_base 91: mod_base = OTHER; note = 2'-O-methyl cytidine
  modified_base 92: mod_base = OTHER; note = 2'-O-methyl guanosine
  modified_base 93: mod_base = OTHER; note = 2'-O-methyl guanosine
  modified_base 94: mod_base = OTHER; note = 2'-O-methyl uridine
  modified_base 95: mod_base = OTHER; note = 2'-O-methyl guanosine
  modified_base 96: mod_base = OTHER; note = 2'-O-methyl cytidine
  modified_base 97: mod_base = OTHER; note = 2'-O-methyl uridine phosphorothioate
  modified_base 98: mod_base = OTHER; note = 2'-O-methyl uridine phosphorothioate
  modified_base 99: mod_base = OTHER; note = 2'-O-methyl uridine phosphorothioate
  modified_base 100: mod_base = OTHER; note = 2'-O-methyl uridine
tggtatcaaggttacaagacgttttagagctagaaatagcaagttaaaataaggctagtccgttatcaacttgaaaaagtggcaccgagtcggtgctttt

SEQ ID NO: 20840 - RNA, 100 nt, synthetic construct
  source 1..100: mol_type = other RNA
  modified_base 1: mod_base = OTHER; note = 2'-O-methyl adenosine phosphorothioate
  modified_base 2: mod_base = OTHER; note = 2'-O-methyl adenosine phosphorothioate
  modified_base 3: mod_base = OTHER; note = 2'-O-methyl guanosine phosphorothioate
  modified_base 29: mod_base = OTHER; note = 2'-O-methyl guanosine
  modified_base 30: mod_base = OTHER; note = 2'-O-methyl cytidine
  modified_base 31: mod_base = OTHER; note = 2'-O-methyl uridine
  modified_base 32: mod_base = OTHER; note = 2'-O-methyl adenosine
  modified_base 33: mod_base = OTHER; note = 2'-O-methyl guanosine
  modified_base 34: mod_base = OTHER; note = 2'-O-methyl adenosine
  modified_base 35: mod_base = OTHER; note = 2'-O-methyl adenosine
  modified_base 36: mod_base = OTHER; note = 2'-O-methyl adenosine
  modified_base 37: mod_base = OTHER; note = 2'-O-methyl uridine
  modified_base 38: mod_base = OTHER; note = 2'-O-methyl adenosine
  modified_base 39: mod_base = OTHER; note = 2'-O-methyl guanosine
  modified_base 40: mod_base = OTHER; note = 2'-O-methyl cytidine
  modified_base 69: mod_base = OTHER; note = 2'-O-methyl adenosine
  modified_base 70: mod_base = OTHER; note = 2'-O-methyl cytidine
  modified_base 71: mod_base = OTHER; note = 2'-O-methyl uridine
  modified_base 72: mod_base = OTHER; note = 2'-O-methyl uridine
  modified_base 73: mod_base = OTHER; note = 2'-O-methyl guanosine
  modified_base 74: mod_base = OTHER; note = 2'-O-methyl adenosine
  modified_base 75: mod_base = OTHER; note = 2'-O-methyl adenosine
  modified_base 76: mod_base = OTHER; note = 2'-O-methyl adenosine
  modified_base 77: mod_base = OTHER; note = 2'-O-methyl adenosine
  modified_base 78: mod_base = OTHER; note = 2'-O-methyl adenosine
  modified_base 79: mod_base = OTHER; note = 2'-O-methyl guanosine
  modified_base 80: mod_base = OTHER; note = 2'-O-methyl uridine
  modified_base 81: mod_base = OTHER; note = 2'-O-methyl guanosine
  modified_base 82: mod_base = OTHER; note = 2'-O-methyl guanosine
  modified_base 83: mod_base = OTHER; note = 2'-O-methyl cytidine
  modified_base 84: mod_base = OTHER; note = 2'-O-methyl adenosine
  modified_base 85: mod_base = OTHER; note = 2'-O-methyl cytidine
  modified_base 86: mod_base = OTHER; note = 2'-O-methyl cytidine
  modified_base 87: mod_base = OTHER; note = 2'-O-methyl guanosine
  modified_base 88: mod_base = OTHER; note = 2'-O-methyl adenosine
  modified_base 89: mod_base = OTHER; note = 2'-O-methyl guanosine
  modified_base 90: mod_base = OTHER; note = 2'-O-methyl uridine
  modified_base 91: mod_base = OTHER; note = 2'-O-methyl cytidine
  modified_base 92: mod_base = OTHER; note = 2'-O-methyl guanosine
  modified_base 93: mod_base = OTHER; note = 2'-O-methyl guanosine
  modified_base 94: mod_base = OTHER; note = 2'-O-methyl uridine
  modified_base 95: mod_base = OTHER; note = 2'-O-methyl guanosine
  modified_base 96: mod_base = OTHER; note = 2'-O-methyl cytidine
  modified_base 97: mod_base = OTHER; note = 2'-O-methyl uridine phosphorothioate
  modified_base 98: mod_base = OTHER; note = 2'-O-methyl uridine phosphorothioate
  modified_base 99: mod_base = OTHER; note = 2'-O-methyl uridine phosphorothioate
  modified_base 100: mod_base = OTHER; note = 2'-O-methyl uridine
aaggttacaagacaggtttagttttagagctagaaatagcaagttaaaataaggctagtccgttatcaacttgaaaaagtggcaccgagtcggtgctttt

SEQ ID NO: 20841 - RNA, 120 nt, synthetic construct; identical to SEQ ID NO: 20606
  source 1..120: mol_type = other RNA
  modified_base 1: mod_base = OTHER; note = 2'-O-methyl cytidine phosphorothioate
  modified_base 2: mod_base = OTHER; note = 2'-O-methyl adenosine phosphorothioate
  modified_base 3: mod_base = OTHER; note = 2'-O-methyl uridine phosphorothioate
  modified_base 29: mod_base = OTHER; note = 2'-O-methyl guanosine
  modified_base 30: mod_base = OTHER; note = 2'-O-methyl cytidine
  modified_base 31: mod_base = OTHER; note = 2'-O-methyl uridine
  modified_base 32: mod_base = OTHER; note = 2'-O-methyl adenosine
  modified_base 33: mod_base = OTHER; note = 2'-O-methyl guanosine
  modified_base 34: mod_base = OTHER; note = 2'-O-methyl adenosine
  modified_base 35: mod_base = OTHER; note = 2'-O-methyl adenosine
  modified_base 36: mod_base = OTHER; note = 2'-O-methyl adenosine
  modified_base 37: mod_base = OTHER; note = 2'-O-methyl uridine
  modified_base 38: mod_base = OTHER; note = 2'-O-methyl adenosine
  modified_base 39: mod_base = OTHER; note = 2'-O-methyl guanosine
  modified_base 40: mod_base = OTHER; note = 2'-O-methyl cytidine
  modified_base 69: mod_base = OTHER; note = 2'-O-methyl adenosine
  modified_base 70: mod_base = OTHER; note = 2'-O-methyl cytidine
  modified_base 71: mod_base = OTHER; note = 2'-O-methyl uridine
  modified_base 72: mod_base = OTHER; note = 2'-O-methyl uridine
  modified_base 73: mod_base = OTHER; note = 2'-O-methyl guanosine
  modified_base 74: mod_base = OTHER; note = 2'-O-methyl adenosine
  modified_base 75: mod_base = OTHER; note = 2'-O-methyl adenosine
  modified_base 76: mod_base = OTHER; note = 2'-O-methyl adenosine
  modified_base 77: mod_base = OTHER; note = 2'-O-methyl adenosine
  modified_base 78: mod_base = OTHER; note = 2'-O-methyl adenosine
  modified_base 79: mod_base = OTHER; note = 2'-O-methyl guanosine
  modified_base 80: mod_base = OTHER; note = 2'-O-methyl uridine
  modified_base 81: mod_base = OTHER; note = 2'-O-methyl guanosine
  modified_base 82: mod_base = OTHER; note = 2'-O-methyl guanosine
  modified_base 83: mod_base = OTHER; note = 2'-O-methyl cytidine
  modified_base 84: mod_base = OTHER; note = 2'-O-methyl adenosine
  modified_base 85: mod_base = OTHER; note = 2'-O-methyl cytidine
  modified_base 86: mod_base = OTHER; note = 2'-O-methyl cytidine
  modified_base 87: mod_base = OTHER; note = 2'-O-methyl guanosine
  modified_base 88: mod_base = OTHER; note = 2'-O-methyl adenosine
  modified_base 89: mod_base = OTHER; note = 2'-O-methyl guanosine
  modified_base 90: mod_base = OTHER; note = 2'-O-methyl uridine
  modified_base 91: mod_base = OTHER; note = 2'-O-methyl cytidine
  modified_base 92: mod_base = OTHER; note = 2'-O-methyl guanosine
  modified_base 93: mod_base = OTHER; note = 2'-O-methyl guanosine
  modified_base 94: mod_base = OTHER; note = 2'-O-methyl uridine
  modified_base 95: mod_base = OTHER; note = 2'-O-methyl guanosine
  modified_base 96: mod_base = OTHER; note = 2'-O-methyl cytidine
  modified_base 117: mod_base = OTHER; note = guanosine phosphorothioate
  modified_base 118: mod_base = OTHER; note = 2'-O-methyl guanosine phosphorothioate
  modified_base 119: mod_base = OTHER; note = 2'-O-methyl uridine phosphorothioate
  modified_base 120: mod_base = OTHER; note = 2'-O-methyl guanosine

SEQ ID NO: 20842 - RNA, 120 nt, synthetic construct
  source 1..120: mol_type = other RNA
  modified_base 1: mod_base = OTHER; note = 2'-O-methyl cytidine phosphorothioate
  modified_base 2: mod_base = OTHER; note = 2'-O-methyl adenosine phosphorothioate
  modified_base 3: mod_base = OTHER; note = 2'-O-methyl uridine phosphorothioate
  modified_base 29: mod_base = OTHER; note = 2'-O-methyl guanosine
  modified_base 30: mod_base = OTHER; note = 2'-O-methyl cytidine
  modified_base 31: mod_base = OTHER; note = 2'-O-methyl uridine
  modified_base 32: mod_base = OTHER; note = 2'-O-methyl adenosine
  modified_base 33: mod_base = OTHER; note = 2'-O-methyl guanosine
  modified_base 34: mod_base = OTHER; note = 2'-O-methyl adenosine
  modified_base 35: mod_base = OTHER; note = 2'-O-methyl adenosine
  modified_base 36: mod_base = OTHER; note = 2'-O-methyl adenosine
  modified_base 37: mod_base = OTHER; note = 2'-O-methyl uridine
  modified_base 38: mod_base = OTHER; note = 2'-O-methyl adenosine
  modified_base 39: mod_base = OTHER; note = 2'-O-methyl guanosine
  modified_base 40: mod_base = OTHER; note = 2'-O-methyl cytidine
  modified_base 69: mod_base = OTHER; note = 2'-O-methyl adenosine
  modified_base 70: mod_base = OTHER; note = 2'-O-methyl cytidine
  modified_base 71: mod_base = OTHER; note = 2'-O-methyl uridine
  modified_base 72: mod_base = OTHER; note = 2'-O-methyl uridine
  modified_base 73: mod_base = OTHER; note = 2'-O-methyl guanosine
  modified_base 74: mod_base = OTHER; note = 2'-O-methyl adenosine
  modified_base 75: mod_base = OTHER; note = 2'-O-methyl adenosine
  modified_base 76: mod_base = OTHER; note = 2'-O-methyl adenosine
  modified_base 77: mod_base = OTHER; note = 2'-O-methyl adenosine
  modified_base 78: mod_base = OTHER; note = 2'-O-methyl adenosine
  modified_base 79: mod_base = OTHER; note = 2'-O-methyl guanosine
  modified_base 80: mod_base = OTHER; note = 2'-O-methyl uridine
  modified_base 81: mod_base = OTHER; note = 2'-O-methyl guanosine
  modified_base 82: mod_base = OTHER; note = 2'-O-methyl guanosine
  modified_base 83: mod_base = OTHER; note = 2'-O-methyl cytidine
  modified_base 84: mod_base = OTHER; note = 2'-O-methyl adenosine
  modified_base 85: mod_base = OTHER; note = 2'-O-methyl cytidine
  modified_base 86: mod_base = OTHER; note = 2'-O-methyl cytidine
  modified_base 87: mod_base = OTHER; note = 2'-O-methyl guanosine
  modified_base 88: mod_base = OTHER; note = 2'-O-methyl adenosine
  modified_base 89: mod_base = OTHER; note = 2'-O-methyl guanosine
  modified_base 90: mod_base = OTHER; note = 2'-O-methyl uridine
  modified_base 91: mod_base = OTHER; note = 2'-O-methyl cytidine
  modified_base 92: mod_base = OTHER; note = 2'-O-methyl guanosine
  modified_base 93: mod_base = OTHER; note = 2'-O-methyl guanosine
  modified_base 94: mod_base = OTHER; note = 2'-O-methyl uridine
  modified_base 95: mod_base = OTHER; note = 2'-O-methyl guanosine
  modified_base 96: mod_base = OTHER; note = 2'-O-methyl cytidine
  modified_base 117: mod_base = OTHER; note = guanosine phosphorothioate
  modified_base 118: mod_base = OTHER; note = 2'-O-methyl guanosine phosphorothioate
  modified_base 119: mod_base = OTHER; note = 2'-O-methyl uridine phosphorothioate
  modified_base 120: mod_base = OTHER; note = 2'-O-methyl guanosine
catggtgcacctgactcctggttttagagctagaaatagcaagttaaaataaggctagtccgttatcaacttgaaaaagtggcaccgagtcggtgcagacttctctgccggagtcaggtg

SEQ ID NO: 20843 - RNA, 120 nt, synthetic construct
  source 1..120: mol_type = other RNA
  modified_base 1: mod_base = OTHER; note = 2'-O-methyl cytidine phosphorothioate
  modified_base 2: mod_base = OTHER; note = 2'-O-methyl adenosine phosphorothioate
  modified_base 3: mod_base = OTHER; note = 2'-O-methyl uridine phosphorothioate
  modified_base 29: mod_base = OTHER; note = 2'-O-methyl guanosine
  modified_base 30: mod_base = OTHER; note = 2'-O-methyl cytidine
  modified_base 31: mod_base = OTHER; note = 2'-O-methyl uridine
  modified_base 32: mod_base = OTHER; note = 2'-O-methyl adenosine
  modified_base 33: mod_base = OTHER; note = 2'-O-methyl guanosine
  modified_base 34: mod_base = OTHER; note = 2'-O-methyl adenosine
  modified_base 35: mod_base = OTHER; note = 2'-O-methyl adenosine
  modified_base 36: mod_base = OTHER; note = 2'-O-methyl adenosine
  modified_base 37: mod_base = OTHER; note = 2'-O-methyl uridine
  modified_base 38: mod_base = OTHER; note = 2'-O-methyl adenosine
  modified_base 39: mod_base = OTHER; note = 2'-O-methyl guanosine
  modified_base 40: mod_base = OTHER; note = 2'-O-methyl cytidine
  modified_base 69: mod_base = OTHER; note = 2'-O-methyl adenosine
  modified_base 70: mod_base = OTHER; note = 2'-O-methyl cytidine
  modified_base 71: mod_base = OTHER; note = 2'-O-methyl uridine
  modified_base 72: mod_base = OTHER; note = 2'-O-methyl uridine
  modified_base 73: mod_base = OTHER; note = 2'-O-methyl guanosine
  modified_base 74: mod_base = OTHER; note = 2'-O-methyl adenosine
  modified_base 75: mod_base = OTHER; note = 2'-O-methyl adenosine
  modified_base 76: mod_base = OTHER; note = 2'-O-methyl adenosine
  modified_base 77: mod_base = OTHER; note = 2'-O-methyl adenosine
  modified_base 78: mod_base = OTHER; note = 2'-O-methyl adenosine
  modified_base 79: mod_base = OTHER; note = 2'-O-methyl guanosine
  modified_base 80: mod_base = OTHER; note = 2'-O-methyl uridine
  modified_base 81: mod_base = OTHER; note = 2'-O-methyl guanosine
  modified_base 82: mod_base = OTHER; note = 2'-O-methyl guanosine
  modified_base 83: mod_base = OTHER; note = 2'-O-methyl cytidine
  modified_base 84: mod_base = OTHER; note = 2'-O-methyl adenosine
  modified_base 85: mod_base = OTHER; note = 2'-O-methyl cytidine
  modified_base 86: mod_base = OTHER; note = 2'-O-methyl cytidine
  modified_base 87: mod_base = OTHER; note = 2'-O-methyl guanosine
  modified_base 88: mod_base = OTHER; note = 2'-O-methyl adenosine
  modified_base 89: mod_base = OTHER; note = 2'-O-methyl guanosine
  modified_base 90: mod_base = OTHER; note = 2'-O-methyl uridine
  modified_base 91: mod_base = OTHER; note = 2'-O-methyl cytidine
  modified_base 92: mod_base = OTHER; note = 2'-O-methyl guanosine
  modified_base 93: mod_base = OTHER; note = 2'-O-methyl guanosine
  modified_base 94: mod_base = OTHER; note = 2'-O-methyl uridine
  modified_base 95: mod_base = OTHER; note = 2'-O-methyl guanosine
  modified_base 96: mod_base = OTHER; note = 2'-O-methyl cytidine
  modified_base 117: mod_base = OTHER; note = guanosine phosphorothioate
  modified_base 118: mod_base = OTHER; note = 2'-O-methyl guanosine phosphorothioate
  modified_base 119: mod_base = OTHER; note = 2'-O-methyl uridine phosphorothioate
  modified_base 120: mod_base = OTHER; note = 2'-O-methyl guanosine
catggtgcacctgactcctggttttagagctagaaatagcaagttaaaataaggctagtccgttatcaacttgaaaaagtggcaccgagtcggtgcagacttctctgcgggagtcaggtg

SEQ ID NO: 20844 - RNA, 120 nt, synthetic construct
  source 1..120: mol_type = other RNA
  modified_base 1: mod_base = OTHER; note = 2'-O-methyl cytidine phosphorothioate
  modified_base 2: mod_base = OTHER; note = 2'-O-methyl adenosine phosphorothioate
  modified_base 3: mod_base = OTHER; note = 2'-O-methyl uridine phosphorothioate
  modified_base 29: mod_base = OTHER; note = 2'-O-methyl guanosine
  modified_base 30: mod_base = OTHER; note = 2'-O-methyl cytidine
  modified_base 31: mod_base = OTHER; note = 2'-O-methyl uridine
  modified_base 32: mod_base = OTHER; note = 2'-O-methyl adenosine
  modified_base 33: mod_base = OTHER; note = 2'-O-methyl guanosine
  modified_base 34: mod_base = OTHER; note = 2'-O-methyl adenosine
  modified_base 35: mod_base = OTHER; note = 2'-O-methyl adenosine
  modified_base 36: mod_base = OTHER; note = 2'-O-methyl adenosine
  modified_base 37: mod_base = OTHER; note = 2'-O-methyl uridine
  modified_base 38: mod_base = OTHER; note = 2'-O-methyl adenosine
  modified_base 39: mod_base = OTHER; note = 2'-O-methyl guanosine
  modified_base 40: mod_base = OTHER; note = 2'-O-methyl cytidine
  modified_base 69: mod_base = OTHER; note = 2'-O-methyl adenosine
  modified_base 70: mod_base = OTHER; note = 2'-O-methyl cytidine
  modified_base 71: mod_base = OTHER; note = 2'-O-methyl uridine
  modified_base 72: mod_base = OTHER; note = 2'-O-methyl uridine
  modified_base 73: mod_base = OTHER; note = 2'-O-methyl guanosine
  modified_base 74: mod_base = OTHER; note = 2'-O-methyl adenosine
  modified_base 75: mod_base = OTHER; note = 2'-O-methyl adenosine
  modified_base 76: mod_base = OTHER; note = 2'-O-methyl adenosine
  modified_base 77: mod_base = OTHER; note = 2'-O-methyl adenosine
  modified_base 78: mod_base = OTHER; note = 2'-O-methyl adenosine
  modified_base 79: mod_base = OTHER; note = 2'-O-methyl guanosine
  modified_base 80: mod_base = OTHER; note = 2'-O-methyl uridine
  modified_base 81: mod_base = OTHER; note = 2'-O-methyl guanosine
  modified_base 82: mod_base = OTHER; note = 2'-O-methyl guanosine
  modified_base 83: mod_base = OTHER; note = 2'-O-methyl cytidine
  modified_base 84: mod_base = OTHER; note = 2'-O-methyl adenosine
  modified_base 85: mod_base = OTHER; note = 2'-O-methyl cytidine
  modified_base 86: mod_base = OTHER; note = 2'-O-methyl cytidine
  modified_base 87: mod_base = OTHER; note = 2'-O-methyl guanosine
  modified_base 88: mod_base = OTHER; note = 2'-O-methyl adenosine
  modified_base 89: mod_base = OTHER; note = 2'-O-methyl guanosine
  modified_base 90: mod_base = OTHER; note = 2'-O-methyl uridine
  modified_base 91: mod_base = OTHER; note = 2'-O-methyl cytidine
  modified_base 92: mod_base = OTHER; note = 2'-O-methyl guanosine
  modified_base 93: mod_base = OTHER; note = 2'-O-methyl guanosine
  modified_base 94: mod_base = OTHER; note = 2'-O-methyl uridine
  modified_base 95: mod_base = OTHER; note = 2'-O-methyl guanosine
  modified_base 96: mod_base = OTHER; note = 2'-O-methyl cytidine
  modified_base 117: mod_base = OTHER; note = guanosine phosphorothioate
  modified_base 118: mod_base = OTHER; note = 2'-O-methyl guanosine phosphorothioate
  modified_base 119: mod_base = OTHER; note = 2'-O-methyl uridine phosphorothioate
  modified_base 120: mod_base = OTHER; note = 2'-O-methyl guanosine
catggtgcacctgactcctggttttagagctagaaatagcaagttaaaataaggctagtccgttatcaacttgaaaaagtggcaccgagtcggtgcagacttctctgctggagtcaggtg

SEQ ID NO: 20845 - RNA, 120 nt, synthetic construct
  source 1..120: mol_type = other RNA
  modified_base 1: mod_base = OTHER; note = 2'-O-methyl cytidine phosphorothioate
  modified_base 2: mod_base = OTHER; note = 2'-O-methyl adenosine phosphorothioate
  modified_base 3: mod_base = OTHER; note = 2'-O-methyl uridine phosphorothioate
  modified_base 29: mod_base = OTHER; note = 2'-O-methyl guanosine
  modified_base 30: mod_base = OTHER; note = 2'-O-methyl cytidine
  modified_base 31: mod_base = OTHER; note = 2'-O-methyl uridine
  modified_base 32: mod_base = OTHER; note = 2'-O-methyl adenosine
  modified_base 33: mod_base = OTHER; note = 2'-O-methyl guanosine
  modified_base 34: mod_base = OTHER; note = 2'-O-methyl adenosine
  modified_base 35: mod_base = OTHER; note = 2'-O-methyl adenosine
  modified_base 36: mod_base = OTHER; note = 2'-O-methyl adenosine
  modified_base 37: mod_base = OTHER; note = 2'-O-methyl uridine
  modified_base 38: mod_base = OTHER; note = 2'-O-methyl adenosine
  modified_base 39: mod_base = OTHER; note = 2'-O-methyl guanosine
  modified_base 40: mod_base = OTHER; note = 2'-O-methyl cytidine
  modified_base 69: mod_base = OTHER; note = 2'-O-methyl adenosine
  modified_base 70: mod_base = OTHER; note = 2'-O-methyl cytidine
  modified_base 71: mod_base = OTHER; note = 2'-O-methyl uridine
  modified_base 72: mod_base = OTHER; note = 2'-O-methyl uridine
  modified_base 73: mod_base = OTHER; note = 2'-O-methyl guanosine
  modified_base 74: mod_base = OTHER; note = 2'-O-methyl adenosine
  modified_base 75: mod_base = OTHER; note = 2'-O-methyl adenosine
  modified_base 76: mod_base = OTHER; note = 2'-O-methyl adenosine
  modified_base 77: mod_base = OTHER; note = 2'-O-methyl adenosine
  modified_base 78: mod_base = OTHER; note = 2'-O-methyl adenosine
  modified_base 79: mod_base = OTHER; note = 2'-O-methyl guanosine
  modified_base 80: mod_base = OTHER; note = 2'-O-methyl uridine
  modified_base 81: mod_base = OTHER; note = 2'-O-methyl guanosine
  modified_base 82: mod_base = OTHER; note = 2'-O-methyl guanosine
  modified_base 83: mod_base = OTHER; note = 2'-O-methyl cytidine
  modified_base 84: mod_base = OTHER; note = 2'-O-methyl adenosine
  modified_base 85: mod_base = OTHER; note = 2'-O-methyl cytidine
  modified_base 86: mod_base = OTHER; note = 2'-O-methyl cytidine
  modified_base 87: mod_base = OTHER; note = 2'-O-methyl guanosine
  modified_base 88: mod_base = OTHER; note = 2'-O-methyl adenosine
  modified_base 89: mod_base = OTHER; note = 2'-O-methyl guanosine
  modified_base 90: mod_base = OTHER; note = 2'-O-methyl uridine
  modified_base 91: mod_base = OTHER; note = 2'-O-methyl cytidine
  modified_base 92: mod_base = OTHER; note = 2'-O-methyl guanosine
  modified_base 93: mod_base = OTHER; note = 2'-O-methyl guanosine
  modified_base 94: mod_base = OTHER; note = 2'-O-methyl uridine
  modified_base 95: mod_base = OTHER; note = 2'-O-methyl guanosine
  modified_base 96: mod_base = OTHER; note = 2'-O-methyl cytidine
  modified_base 117: mod_base = OTHER; note = guanosine phosphorothioate
  modified_base 118: mod_base = OTHER; note = 2'-O-methyl guanosine phosphorothioate
  modified_base 119: mod_base = OTHER; note = 2'-O-methyl uridine phosphorothioate
  modified_base 120: mod_base = OTHER; note = 2'-O-methyl guanosine
catggtgcacctgactcctggttttagagctagaaatagcaagttaaaataaggctagtccgttatcaacttgaaaaagtggcaccgagtcggtgcagatttctctgcaggagtcaggtg

SEQ ID NO: 20846 - RNA, 120 nt, synthetic construct
  source 1..120: mol_type = other RNA
  modified_base 1: mod_base = OTHER; note = 2'-O-methyl cytidine phosphorothioate
  modified_base 2: mod_base = OTHER; note = 2'-O-methyl adenosine phosphorothioate
  modified_base 3: mod_base = OTHER; note = 2'-O-methyl uridine phosphorothioate
  modified_base 29: mod_base = OTHER; note = 2'-O-methyl guanosine
  modified_base 30: mod_base = OTHER; note = 2'-O-methyl cytidine
  modified_base 31: mod_base = OTHER; note = 2'-O-methyl uridine
  modified_base 32: mod_base = OTHER; note = 2'-O-methyl adenosine
  modified_base 33: mod_base = OTHER; note = 2'-O-methyl guanosine
  modified_base 34: mod_base = OTHER; note = 2'-O-methyl adenosine
  modified_base 35: mod_base = OTHER; note = 2'-O-methyl adenosine
  modified_base 36: mod_base = OTHER; note = 2'-O-methyl adenosine
  modified_base 37: mod_base = OTHER; note = 2'-O-methyl uridine
  modified_base 38: mod_base = OTHER; note = 2'-O-methyl adenosine
  modified_base 39: mod_base = OTHER; note = 2'-O-methyl guanosine
  modified_base 40: mod_base = OTHER; note = 2'-O-methyl cytidine
  modified_base 69: mod_base = OTHER; note = 2'-O-methyl adenosine
  modified_base 70: mod_base = OTHER; note = 2'-O-methyl cytidine
  modified_base 71: mod_base = OTHER; note = 2'-O-methyl uridine
  modified_base 72: mod_base = OTHER; note = 2'-O-methyl uridine
  modified_base 73: mod_base = OTHER; note = 2'-O-methyl guanosine
  modified_base 74: mod_base = OTHER; note = 2'-O-methyl adenosine
  modified_base 75: mod_base = OTHER; note = 2'-O-methyl adenosine
  modified_base 76: mod_base = OTHER; note = 2'-O-methyl adenosine
  modified_base 77: mod_base = OTHER; note = 2'-O-methyl adenosine
  modified_base 78: mod_base = OTHER; note = 2'-O-methyl adenosine
  modified_base 79: mod_base = OTHER; note = 2'-O-methyl guanosine
  modified_base 80: mod_base = OTHER; note = 2'-O-methyl uridine
  modified_base 81: mod_base = OTHER; note = 2'-O-methyl guanosine
  modified_base 82: mod_base = OTHER; note = 2'-O-methyl guanosine
  modified_base 83: mod_base = OTHER; note = 2'-O-methyl cytidine
  modified_base 84: mod_base = OTHER; note = 2'-O-methyl adenosine
  modified_base 85: mod_base = OTHER; note = 2'-O-methyl cytidine
  modified_base 86: mod_base = OTHER; note = 2'-O-methyl cytidine
  modified_base 87: mod_base = OTHER; note = 2'-O-methyl guanosine
  modified_base 88: mod_base = OTHER; note = 2'-O-methyl adenosine
  modified_base 89: mod_base = OTHER; note = 2'-O-methyl guanosine
  modified_base 90: mod_base = OTHER; note = 2'-O-methyl uridine
  modified_base 91: mod_base = OTHER; note = 2'-O-methyl cytidine
  modified_base 92: mod_base = OTHER; note = 2'-O-methyl guanosine
  modified_base 93: mod_base = OTHER; note = 2'-O-methyl guanosine
  modified_base 94: mod_base = OTHER; note = 2'-O-methyl uridine
  modified_base 95: mod_base = OTHER; note = 2'-O-methyl guanosine
  modified_base 96: mod_base = OTHER; note = 2'-O-methyl cytidine
  modified_base 117: mod_base = OTHER; note = guanosine phosphorothioate
  modified_base 118: mod_base = OTHER; note = 2'-O-methyl guanosine phosphorothioate
  modified_base 119: mod_base = OTHER; note = 2'-O-methyl uridine phosphorothioate
  modified_base 120: mod_base = OTHER; note = 2'-O-methyl guanosine
catggtgcacctgactcctggttttagagctagaaatagcaagttaaaataaggctagtccgttatcaacttgaaaaagtggcaccgagtcggtgcagacttttctgcaggagtcaggtg

SEQ ID NO: 20847 - RNA, 120 nt, synthetic construct
  source 1..120: mol_type = other RNA
  modified_base 1: mod_base = OTHER; note = 2'-O-methyl cytidine phosphorothioate
  modified_base 2: mod_base = OTHER; note = 2'-O-methyl adenosine phosphorothioate
  modified_base 3: mod_base = OTHER; note = 2'-O-methyl uridine phosphorothioate
  modified_base 29: mod_base = OTHER; note = 2'-O-methyl guanosine
  modified_base 30: mod_base = OTHER; note = 2'-O-methyl cytidine
  modified_base 31: mod_base = OTHER; note = 2'-O-methyl uridine
  modified_base 32: mod_base = OTHER; note = 2'-O-methyl adenosine
  modified_base 33: mod_base = OTHER; note = 2'-O-methyl guanosine
  modified_base 34: mod_base = OTHER; note = 2'-O-methyl adenosine
  modified_base 35: mod_base = OTHER; note = 2'-O-methyl adenosine
  modified_base 36: mod_base = OTHER; note = 2'-O-methyl adenosine
  modified_base 37: mod_base = OTHER; note = 2'-O-methyl uridine
  modified_base 38: mod_base = OTHER; note = 2'-O-methyl adenosine
  modified_base 39: mod_base = OTHER; note = 2'-O-methyl guanosine
  modified_base 40: mod_base = OTHER; note = 2'-O-methyl cytidine
  modified_base 69: mod_base = OTHER; note = 2'-O-methyl adenosine
  modified_base 70: mod_base = OTHER; note = 2'-O-methyl cytidine
  modified_base 71: mod_base = OTHER; note = 2'-O-methyl uridine
  modified_base 72: mod_base = OTHER; note = 2'-O-methyl uridine
  modified_base 73: mod_base = OTHER; note = 2'-O-methyl guanosine
  modified_base 74: mod_base = OTHER; note = 2'-O-methyl adenosine
  modified_base 75: mod_base = OTHER; note = 2'-O-methyl adenosine
  modified_base 76: mod_base = OTHER; note = 2'-O-methyl adenosine
  modified_base 77: mod_base = OTHER; note = 2'-O-methyl adenosine
  modified_base 78: mod_base = OTHER; note = 2'-O-methyl adenosine
  modified_base 79: mod_base = OTHER; note = 2'-O-methyl guanosine
  modified_base 80: mod_base = OTHER; note = 2'-O-methyl uridine
  modified_base 81: mod_base = OTHER; note = 2'-O-methyl guanosine
  modified_base 82: mod_base = OTHER; note = 2'-O-methyl guanosine
  modified_base 83: mod_base = OTHER; note = 2'-O-methyl cytidine
  modified_base 84: mod_base = OTHER; note = 2'-O-methyl adenosine
  modified_base 85: mod_base = OTHER; note = 2'-O-methyl cytidine
  modified_base 86: mod_base = OTHER; note = 2'-O-methyl cytidine
  modified_base 87: mod_base = OTHER; note = 2'-O-methyl guanosine
  modified_base 88: mod_base = OTHER; note = 2'-O-methyl adenosine
  modified_base 89: mod_base = OTHER; note = 2'-O-methyl guanosine
  modified_base 90: mod_base = OTHER; note = 2'-O-methyl uridine
  modified_base 91: mod_base = OTHER; note = 2'-O-methyl cytidine
  modified_base 92: mod_base = OTHER; note = 2'-O-methyl guanosine
  modified_base 93: mod_base = OTHER; note = 2'-O-methyl guanosine
  modified_base 94: mod_base = OTHER; note = 2'-O-methyl uridine
  modified_base 95: mod_base = OTHER; note = 2'-O-methyl guanosine
  modified_base 96: mod_base = OTHER; note = 2'-O-methyl cytidine
  modified_base 117: mod_base = OTHER; note = guanosine phosphorothioate
  modified_base 118: mod_base = OTHER; note = 2'-O-methyl guanosine phosphorothioate
  modified_base 119: mod_base = OTHER; note = 2'-O-methyl uridine phosphorothioate
  modified_base 120: mod_base = OTHER; note = 2'-O-methyl guanosine
catggtgcacctgactcctggttttagagctagaaatagcaagttaaaataaggctagtccgttatcaacttgaaaaagtggcaccgagtcggtgcagacttttctgccggagtcaggtg

SEQ ID NO: 20848 - RNA, 120 nt, synthetic construct
  source 1..120: mol_type = other RNA
  modified_base 1: mod_base = OTHER; note = 2'-O-methyl cytidine phosphorothioate
  modified_base 2: mod_base = OTHER; note = 2'-O-methyl adenosine phosphorothioate
  modified_base 3: mod_base = OTHER; note = 2'-O-methyl uridine phosphorothioate
  modified_base 29: mod_base = OTHER; note = 2'-O-methyl guanosine
  modified_base 30: mod_base = OTHER; note = 2'-O-methyl cytidine
  modified_base 31: mod_base = OTHER; note = 2'-O-methyl uridine
  modified_base 32: mod_base = OTHER; note = 2'-O-methyl adenosine
  modified_base 33: mod_base = OTHER; note = 2'-O-methyl guanosine
  modified_base 34: mod_base = OTHER; note = 2'-O-methyl adenosine
  modified_base 35: mod_base = OTHER; note = 2'-O-methyl adenosine
  modified_base 36: mod_base = OTHER; note = 2'-O-methyl adenosine
  modified_base 37: mod_base = OTHER; note = 2'-O-methyl uridine
  modified_base 38: mod_base = OTHER; note = 2'-O-methyl adenosine
  modified_base 39: mod_base = OTHER; note = 2'-O-methyl guanosine
  modified_base 40: mod_base = OTHER; note = 2'-O-methyl cytidine
  modified_base 69: mod_base = OTHER; note = 2'-O-methyl adenosine
  modified_base 70: mod_base = OTHER; note = 2'-O-methyl cytidine
  modified_base 71: mod_base = OTHER; note = 2'-O-methyl uridine
  modified_base 72: mod_base = OTHER; note = 2'-O-methyl uridine
  modified_base 73: mod_base = OTHER; note = 2'-O-methyl guanosine
  modified_base 74: mod_base = OTHER; note = 2'-O-methyl adenosine
  modified_base 75: mod_base = OTHER; note = 2'-O-methyl adenosine
  modified_base 76: mod_base = OTHER; note = 2'-O-methyl adenosine
  modified_base 77: mod_base = OTHER; note = 2'-O-methyl adenosine
  modified_base 78: mod_base = OTHER; note = 2'-O-methyl adenosine
  modified_base 79: mod_base = OTHER; note = 2'-O-methyl guanosine
  modified_base 80: mod_base = OTHER; note = 2'-O-methyl uridine
  modified_base 81: mod_base = OTHER; note = 2'-O-methyl guanosine
  modified_base 82: mod_base = OTHER; note = 2'-O-methyl guanosine
  modified_base 83: mod_base = OTHER; note = 2'-O-methyl cytidine
  modified_base 84: mod_base = OTHER; note = 2'-O-methyl adenosine
  modified_base 85: mod_base = OTHER; note = 2'-O-methyl cytidine
  modified_base 86: mod_base = OTHER; note = 2'-O-methyl cytidine
  modified_base 87: mod_base = OTHER; note = 2'-O-methyl guanosine
  modified_base 88: mod_base = OTHER; note = 2'-O-methyl adenosine
  modified_base 89: mod_base = OTHER; note = 2'-O-methyl guanosine
  modified_base 90: mod_base = OTHER; note = 2'-O-methyl uridine
  modified_base 91: mod_base = OTHER; note = 2'-O-methyl cytidine
  modified_base 92: mod_base = OTHER; note = 2'-O-methyl guanosine
  modified_base 93: mod_base = OTHER; note = 2'-O-methyl guanosine
  modified_base 94: mod_base = OTHER; note = 2'-O-methyl uridine
  modified_base 95: mod_base = OTHER; note = 2'-O-methyl guanosine
  modified_base 96: mod_base = OTHER; note = 2'-O-methyl cytidine
  modified_base 117: mod_base = OTHER; note = guanosine phosphorothioate
  modified_base 118: mod_base = OTHER; note = 2'-O-methyl guanosine phosphorothioate
  modified_base 119: mod_base = OTHER; note = 2'-O-methyl uridine phosphorothioate
  modified_base 120: mod_base = OTHER; note = 2'-O-methyl guanosine
catggtgcacctgactcctggttttagagctagaaatagcaagttaaaataaggctagtccgttatcaacttgaaaaagtggcaccgagtcggtgcagacttttctgcgggagtcaggtg

SEQ ID NO: 20849 - RNA, 120 nt, synthetic construct
  source 1..120: mol_type = other RNA
  modified_base 1: mod_base = OTHER; note = 2'-O-methyl cytidine phosphorothioate
  modified_base 2: mod_base = OTHER; note = 2'-O-methyl adenosine phosphorothioate
  modified_base 3: mod_base = OTHER; note = 2'-O-methyl uridine phosphorothioate
  modified_base 29: mod_base = OTHER; note = 2'-O-methyl guanosine
  modified_base 30: mod_base = OTHER; note = 2'-O-methyl cytidine
  modified_base 31: mod_base = OTHER; note = 2'-O-methyl uridine
  modified_base 32: mod_base = OTHER; note = 2'-O-methyl adenosine
  modified_base 33: mod_base = OTHER; note = 2'-O-methyl guanosine
  modified_base 34: mod_base = OTHER; note = 2'-O-methyl adenosine
  modified_base 35: mod_base = OTHER; note = 2'-O-methyl adenosine
  modified_base 36: mod_base = OTHER; note = 2'-O-methyl adenosine
  modified_base 37: mod_base = OTHER; note = 2'-O-methyl uridine
  modified_base 38: mod_base = OTHER; note = 2'-O-methyl adenosine
  modified_base 39: mod_base = OTHER; note = 2'-O-methyl guanosine
  modified_base 40: mod_base = OTHER; note = 2'-O-methyl cytidine
  modified_base 69: mod_base = OTHER; note = 2'-O-methyl adenosine
  modified_base 70: mod_base = OTHER; note = 2'-O-methyl cytidine
  modified_base 71: mod_base = OTHER; note = 2'-O-methyl uridine
  modified_base 72: mod_base = OTHER; note = 2'-O-methyl uridine
  modified_base 73: mod_base = OTHER; note = 2'-O-methyl guanosine
  modified_base 74: mod_base = OTHER; note = 2'-O-methyl adenosine
  modified_base 75: mod_base = OTHER; note = 2'-O-methyl adenosine
  modified_base 76: mod_base = OTHER; note = 2'-O-methyl adenosine
  modified_base 77: mod_base = OTHER; note = 2'-O-methyl adenosine
  modified_base 78: mod_base = OTHER; note = 2'-O-methyl adenosine
  modified_base 79: mod_base = OTHER; note = 2'-O-methyl guanosine
  modified_base 80: mod_base = OTHER; note = 2'-O-methyl uridine
  modified_base 81: mod_base = OTHER; note = 2'-O-methyl guanosine
  modified_base 82: mod_base = OTHER; note = 2'-O-methyl guanosine
  modified_base 83: mod_base = OTHER; note = 2'-O-methyl cytidine
  modified_base 84: mod_base = OTHER; note = 2'-O-methyl adenosine
  modified_base 85: mod_base = OTHER; note = 2'-O-methyl cytidine
  modified_base 86: mod_base = OTHER; note = 2'-O-methyl cytidine
  modified_base 87: mod_base = OTHER; note = 2'-O-methyl guanosine
  modified_base 88: mod_base = OTHER; note = 2'-O-methyl adenosine
  modified_base 89: mod_base = OTHER; note = 2'-O-methyl guanosine
  modified_base 90: mod_base = OTHER; note = 2'-O-methyl uridine
  modified_base 91: mod_base = OTHER; note = 2'-O-methyl cytidine
  modified_base 92: mod_base = OTHER; note = 2'-O-methyl guanosine
  modified_base 93: mod_base = OTHER; note = 2'-O-methyl guanosine
  modified_base 94: mod_base = OTHER; note = 2'-O-methyl uridine
  modified_base 95: mod_base = OTHER; note = 2'-O-methyl guanosine
  modified_base 96: mod_base = OTHER; note = 2'-O-methyl cytidine
  modified_base 117: mod_base = OTHER; note = guanosine phosphorothioate
  modified_base 118: mod_base = OTHER; note = 2'-O-methyl guanosine phosphorothioate
  modified_base 119: mod_base = OTHER; note = 2'-O-methyl uridine phosphorothioate
  modified_base 120: mod_base = OTHER; note = 2'-O-methyl guanosine
catggtgcacctgactcctggttttagagctagaaatagcaagttaaaataaggctagtccgttatcaacttgaaaaagtggcaccgagtcggtgcagacttttctgctggagtcaggtg

SEQ ID NO: 20850 - RNA, 120 nt, synthetic construct
  source 1..120: mol_type = other RNA
  modified_base 1: mod_base = OTHER; note = 2'-O-methyl cytidine phosphorothioate
  modified_base 2: mod_base = OTHER; note = 2'-O-methyl adenosine phosphorothioate
  modified_base 3: mod_base = OTHER; note = 2'-O-methyl uridine phosphorothioate
  modified_base 29: mod_base = OTHER; note = 2'-O-methyl guanosine
  modified_base 30: mod_base = OTHER; note = 2'-O-methyl cytidine
  modified_base 31: mod_base = OTHER; note = 2'-O-methyl uridine
  modified_base 32: mod_base = OTHER; note = 2'-O-methyl adenosine
  modified_base 33: mod_base = OTHER; note = 2'-O-methyl guanosine
  modified_base 34: mod_base = OTHER; note = 2'-O-methyl adenosine
  modified_base 35: mod_base = OTHER; note = 2'-O-methyl adenosine
  modified_base 36: mod_base = OTHER; note = 2'-O-methyl adenosine
  modified_base 37: mod_base = OTHER; note = 2'-O-methyl uridine
  modified_base 38: mod_base = OTHER; note = 2'-O-methyl adenosine
  modified_base 39: mod_base = OTHER; note = 2'-O-methyl guanosine
  modified_base 40: mod_base = OTHER; note = 2'-O-methyl cytidine
  modified_base 69: mod_base = OTHER; note = 2'-O-methyl adenosine
  modified_base 70: mod_base = OTHER; note = 2'-O-methyl cytidine
  modified_base 71: mod_base = OTHER; note = 2'-O-methyl uridine
  modified_base 72: mod_base = OTHER; note = 2'-O-methyl uridine
  modified_base 73: mod_base = OTHER; note = 2'-O-methyl guanosine
  modified_base 74: mod_base = OTHER; note = 2'-O-methyl adenosine
  modified_base 75: mod_base = OTHER; note = 2'-O-methyl adenosine
  modified_base 76: mod_base = OTHER; note = 2'-O-methyl adenosine
  modified_base 77: mod_base = OTHER; note = 2'-O-methyl adenosine
  modified_base 78: mod_base = OTHER; note = 2'-O-methyl adenosine
  modified_base 79: mod_base = OTHER; note = 2'-O-methyl guanosine
  modified_base 80: mod_base = OTHER; note = 2'-O-methyl uridine
  modified_base 81: mod_base = OTHER; note = 2'-O-methyl guanosine
  modified_base 82: mod_base = OTHER; note = 2'-O-methyl guanosine
  modified_base 83: mod_base = OTHER; note = 2'-O-methyl cytidine
  modified_base 84: mod_base = OTHER; note = 2'-O-methyl adenosine
  modified_base 85: mod_base = OTHER; note = 2'-O-methyl cytidine
  modified_base 86: mod_base = OTHER; note = 2'-O-methyl cytidine
  modified_base 87: mod_base = OTHER; note = 2'-O-methyl guanosine
  modified_base 88: mod_base = OTHER; note = 2'-O-methyl adenosine
  modified_base 89: mod_base = OTHER; note = 2'-O-methyl guanosine
  modified_base 90: mod_base = OTHER; note = 2'-O-methyl uridine
  modified_base 91: mod_base = OTHER; note = 2'-O-methyl cytidine
  modified_base 92: mod_base = OTHER; note = 2'-O-methyl guanosine
  modified_base 93: mod_base = OTHER; note = 2'-O-methyl guanosine
  modified_base 94: mod_base = OTHER; note = 2'-O-methyl uridine
  modified_base 95: mod_base = OTHER; note = 2'-O-methyl guanosine
  modified_base 96: mod_base = OTHER; note = 2'-O-methyl cytidine
  modified_base 117: mod_base = OTHER; note = guanosine phosphorothioate
  modified_base 118: mod_base = OTHER; note = 2'-O-methyl guanosine phosphorothioate
  modified_base 119: mod_base = OTHER; note = 2'-O-methyl uridine phosphorothioate
  modified_base 120: mod_base = OTHER; note = 2'-O-methyl guanosine
catggtgcacctgactcctggttttagagctagaaatagcaagttaaaataaggctagtccgttatcaacttgaaaaagtggcaccgagtcggtgcagatttctctgccggagtcaggtg

SEQ ID NO: 20851 - RNA, 120 nt, synthetic construct
  source 1..120: mol_type = other RNA
  modified_base 1: mod_base = OTHER; note = 2'-O-methyl cytidine phosphorothioate
  modified_base 2: mod_base = OTHER; note = 2'-O-methyl adenosine phosphorothioate
  modified_base 3: mod_base = OTHER; note = 2'-O-methyl uridine phosphorothioate
  modified_base 29: mod_base = OTHER; note = 2'-O-methyl guanosine
  modified_base 30: mod_base = OTHER; note = 2'-O-methyl cytidine
  modified_base 31: mod_base = OTHER; note = 2'-O-methyl uridine
  modified_base 32: mod_base = OTHER; note = 2'-O-methyl adenosine
  modified_base 33: mod_base = OTHER; note = 2'-O-methyl guanosine
  modified_base 34: mod_base = OTHER; note = 2'-O-methyl adenosine
  modified_base 35: mod_base = OTHER; note = 2'-O-methyl adenosine
  modified_base 36: mod_base = OTHER; note = 2'-O-methyl adenosine
  modified_base 37: mod_base = OTHER; note = 2'-O-methyl uridine
  modified_base 38: mod_base = OTHER; note = 2'-O-methyl adenosine
  modified_base 39: mod_base = OTHER; note = 2'-O-methyl guanosine
  modified_base 40: mod_base = OTHER; note = 2'-O-methyl cytidine
  modified_base 69: mod_base = OTHER; note = 2'-O-methyl adenosine
  modified_base 70: mod_base = OTHER; note = 2'-O-methyl cytidine
  modified_base 71: mod_base = OTHER; note = 2'-O-methyl uridine
  modified_base 72: mod_base = OTHER; note = 2'-O-methyl uridine
  modified_base 73: mod_base = OTHER; note = 2'-O-methyl guanosine
  modified_base 74: mod_base = OTHER; note = 2'-O-methyl adenosine
  modified_base 75: mod_base = OTHER; note = 2'-O-methyl adenosine
  modified_base 76: mod_base = OTHER; note = 2'-O-methyl adenosine
  modified_base 77: mod_base = OTHER; note = 2'-O-methyl adenosine
  modified_base 78: mod_base = OTHER; note = 2'-O-methyl adenosine
  modified_base 79: mod_base = OTHER; note = 2'-O-methyl guanosine
  modified_base 80: mod_base = OTHER; note = 2'-O-methyl uridine
  modified_base 81: mod_base = OTHER; note = 2'-O-methyl guanosine
  modified_base 82: mod_base = OTHER; note = 2'-O-methyl guanosine
  modified_base 83: mod_base = OTHER; note = 2'-O-methyl cytidine
  modified_base 84: mod_base = OTHER; note = 2'-O-methyl adenosine
  modified_base 85: mod_base = OTHER; note = 2'-O-methyl cytidine
  modified_base 86: mod_base = OTHER; note = 2'-O-methyl cytidine
  modified_base 87: mod_base = OTHER; note = 2'-O-methyl guanosine
  modified_base 88: mod_base = OTHER; note = 2'-O-methyl adenosine
  modified_base 89: mod_base = OTHER; note = 2'-O-methyl guanosine
  modified_base 90: mod_base = OTHER; note = 2'-O-methyl uridine
  modified_base 91: mod_base = OTHER; note = 2'-O-methyl cytidine
  modified_base 92: mod_base = OTHER; note = 2'-O-methyl guanosine
  modified_base 93: mod_base = OTHER; note = 2'-O-methyl guanosine
  modified_base 94: mod_base = OTHER; note = 2'-O-methyl uridine
  modified_base 95: mod_base = OTHER; note = 2'-O-methyl guanosine
  modified_base 96: mod_base = OTHER; note = 2'-O-methyl cytidine
  modified_base 117: mod_base = OTHER; note = guanosine phosphorothioate
  modified_base 118: mod_base = OTHER; note = 2'-O-methyl guanosine phosphorothioate
  modified_base 119: mod_base = OTHER; note = 2'-O-methyl uridine phosphorothioate
  modified_base 120: mod_base = OTHER; note = 2'-O-methyl guanosine
catggtgcacctgactcctggttttagagctagaaatagcaagttaaaataaggctagtccgttatcaacttgaaaaagtggcaccgagtcggtgcagatttctctgcgggagtcaggtg

SEQ ID NO: 20852 - RNA, 120 nt, synthetic construct
  source 1..120: mol_type = other RNA
  modified_base 1: mod_base = OTHER; note = 2'-O-methyl cytidine phosphorothioate
  modified_base 2: mod_base = OTHER; note = 2'-O-methyl adenosine phosphorothioate
  modified_base 3: mod_base = OTHER; note = 2'-O-methyl uridine phosphorothioate
  modified_base 29: mod_base = OTHER; note = 2'-O-methyl guanosine
  modified_base 30: mod_base = OTHER; note = 2'-O-methyl cytidine
  modified_base 31: mod_base = OTHER; note = 2'-O-methyl uridine
  modified_base 32: mod_base = OTHER; note = 2'-O-methyl adenosine
  modified_base 33: mod_base = OTHER; note = 2'-O-methyl guanosine
  modified_base 34: mod_base = OTHER; note = 2'-O-methyl adenosine
  modified_base 35: mod_base = OTHER; note = 2'-O-methyl adenosine
  modified_base 36: mod_base = OTHER; note = 2'-O-methyl adenosine
  modified_base 37: mod_base = OTHER; note = 2'-O-methyl uridine
  modified_base 38: mod_base = OTHER; note = 2'-O-methyl adenosine
  modified_base 39: mod_base = OTHER; note = 2'-O-methyl guanosine
  modified_base 40: mod_base = OTHER; note = 2'-O-methyl cytidine
  modified_base 69: mod_base = OTHER; note = 2'-O-methyl adenosine
  modified_base 70: mod_base = OTHER; note = 2'-O-methyl cytidine
  modified_base 71: mod_base = OTHER; note = 2'-O-methyl uridine
  modified_base 72: mod_base = OTHER; note = 2'-O-methyl uridine
  modified_base 73: mod_base = OTHER; note = 2'-O-methyl guanosine
  modified_base 74: mod_base = OTHER; note = 2'-O-methyl adenosine
  modified_base 75: mod_base = OTHER; note = 2'-O-methyl adenosine
  modified_base 76: mod_base = OTHER; note = 2'-O-methyl adenosine
  modified_base 77: mod_base = OTHER; note = 2'-O-methyl adenosine
  modified_base 78: mod_base = OTHER; note = 2'-O-methyl adenosine
  modified_base 79: mod_base = OTHER; note = 2'-O-methyl guanosine
  modified_base 80: mod_base = OTHER; note = 2'-O-methyl uridine
  modified_base 81: mod_base = OTHER; note = 2'-O-methyl guanosine
  modified_base 82: mod_base = OTHER; note = 2'-O-methyl guanosine
  modified_base 83: mod_base = OTHER; note = 2'-O-methyl cytidine
  modified_base 84: mod_base = OTHER; note = 2'-O-methyl adenosine
  modified_base 85: mod_base = OTHER; note = 2'-O-methyl cytidine
  modified_base 86: mod_base = OTHER; note = 2'-O-methyl cytidine
  modified_base 87: mod_base = OTHER; note = 2'-O-methyl guanosine
  modified_base 88: mod_base = OTHER; note = 2'-O-methyl adenosine
  modified_base 89: mod_base = OTHER; note = 2'-O-methyl guanosine
  modified_base 90: mod_base = OTHER; note = 2'-O-methyl uridine
  modified_base 91: mod_base = OTHER; note = 2'-O-methyl cytidine
  modified_base 92: mod_base = OTHER; note = 2'-O-methyl guanosine
  modified_base 93: mod_base = OTHER; note = 2'-O-methyl guanosine
  modified_base 94: mod_base = OTHER; note = 2'-O-methyl uridine
  modified_base 95: mod_base = OTHER; note = 2'-O-methyl guanosine
  modified_base 96: mod_base = OTHER; note = 2'-O-methyl cytidine
  modified_base 117: mod_base = OTHER; note = guanosine phosphorothioate
  modified_base 118: mod_base = OTHER; note = 2'-O-methyl guanosine phosphorothioate
  modified_base 119: mod_base = OTHER; note = 2'-O-methyl uridine phosphorothioate
  modified_base 120: mod_base = OTHER; note = 2'-O-methyl guanosine
catggtgcacctgactcctggttttagagctagaaatagcaagttaaaataaggctagtccgttatcaacttgaaaaagtggcaccgagtcggtgcagatttctctgctggagtcaggtg

SEQ ID NO: 20853 - RNA, 120 nt, synthetic construct
  source 1..120: mol_type = other RNA
  modified_base 1: mod_base = OTHER; note = 2'-O-methyl cytidine phosphorothioate
  modified_base 2: mod_base = OTHER; note = 2'-O-methyl adenosine phosphorothioate
  modified_base 3: mod_base = OTHER; note = 2'-O-methyl uridine phosphorothioate
  modified_base 29: mod_base = OTHER; note = 2'-O-methyl guanosine
  modified_base 30: mod_base = OTHER; note = 2'-O-methyl cytidine
  modified_base 31: mod_base = OTHER; note = 2'-O-methyl uridine
  modified_base 32: mod_base = OTHER; note = 2'-O-methyl adenosine
  modified_base 33: mod_base = OTHER; note = 2'-O-methyl guanosine
  modified_base 34: mod_base = OTHER; note = 2'-O-methyl adenosine
  modified_base 35: mod_base = OTHER; note = 2'-O-methyl adenosine
  modified_base 36: mod_base = OTHER; note = 2'-O-methyl adenosine
  modified_base 37: mod_base = OTHER; note = 2'-O-methyl uridine
  modified_base 38: mod_base = OTHER; note = 2'-O-methyl adenosine
  modified_base 39: mod_base = OTHER; note = 2'-O-methyl guanosine
  modified_base 40: mod_base = OTHER; note = 2'-O-methyl cytidine
  modified_base 69: mod_base = OTHER; note = 2'-O-methyl adenosine
  modified_base 70: mod_base = OTHER; note = 2'-O-methyl cytidine
  modified_base 71: mod_base = OTHER; note = 2'-O-methyl uridine
  modified_base 72: mod_base = OTHER; note = 2'-O-methyl uridine
  modified_base 73: mod_base = OTHER; note = 2'-O-methyl guanosine
  modified_base 74: mod_base = OTHER; note = 2'-O-methyl adenosine
  modified_base 75: mod_base = OTHER; note = 2'-O-methyl adenosine
  modified_base 76: mod_base = OTHER; note = 2'-O-methyl adenosine
  modified_base 77: mod_base = OTHER; note = 2'-O-methyl adenosine
  modified_base 78: mod_base = OTHER; note = 2'-O-methyl adenosine
  modified_base 79: mod_base = OTHER; note = 2'-O-methyl guanosine
  modified_base 80: mod_base = OTHER; note = 2'-O-methyl uridine
  modified_base 81: mod_base = OTHER; note = 2'-O-methyl guanosine
  modified_base 82: mod_base = OTHER; note = 2'-O-methyl guanosine
  modified_base 83: mod_base = OTHER; note = 2'-O-methyl cytidine
  modified_base 84: mod_base = OTHER; note = 2'-O-methyl adenosine
  modified_base 85: mod_base = OTHER; note = 2'-O-methyl cytidine
  modified_base 86: mod_base = OTHER; note = 2'-O-methyl cytidine
  modified_base 87: mod_base = OTHER; note = 2'-O-methyl guanosine
  modified_base 88: mod_base = OTHER; note = 2'-O-methyl adenosine
  modified_base 89: mod_base = OTHER; note = 2'-O-methyl guanosine
  modified_base 90: mod_base = OTHER; note = 2'-O-methyl uridine
  modified_base 91: mod_base = OTHER; note = 2'-O-methyl cytidine
  modified_base 92: mod_base = OTHER; note = 2'-O-methyl guanosine
  modified_base 93: mod_base = OTHER; note = 2'-O-methyl guanosine
  modified_base 94: mod_base = OTHER; note = 2'-O-methyl uridine
  modified_base 95: mod_base = OTHER; note = 2'-O-methyl guanosine
  modified_base 96: mod_base = OTHER; note = 2'-O-methyl cytidine
  modified_base 117: mod_base = OTHER; note = guanosine phosphorothioate
  modified_base 118: mod_base = OTHER; note = 2'-O-methyl guanosine phosphorothioate
  modified_base 119: mod_base = OTHER; note = 2'-O-methyl uridine phosphorothioate
  modified_base 120: mod_base = OTHER; note = 2'-O-methyl guanosine
catggtgcacctgactcctggttttagagctagaaatagcaagttaaaataaggctagtccgttatcaacttgaaaaagtggcaccgagtcggtgcagatttttctgcaggagtcaggtg

SEQ ID NO: 20854 - RNA, 120 nt, synthetic construct
  source 1..120: mol_type = other RNA
  modified_base 1: mod_base = OTHER; note = 2'-O-methyl cytidine phosphorothioate
  modified_base 2: mod_base = OTHER; note = 2'-O-methyl adenosine phosphorothioate
  modified_base 3: mod_base = OTHER; note = 2'-O-methyl uridine phosphorothioate
  modified_base 29: mod_base = OTHER; note = 2'-O-methyl guanosine
  modified_base 30: mod_base = OTHER; note = 2'-O-methyl cytidine
  modified_base 31: mod_base = OTHER; note = 2'-O-methyl uridine
  modified_base 32: mod_base = OTHER; note = 2'-O-methyl adenosine
  modified_base 33: mod_base = OTHER; note = 2'-O-methyl guanosine
  modified_base 34: mod_base = OTHER; note = 2'-O-methyl adenosine
  modified_base 35: mod_base = OTHER; note = 2'-O-methyl adenosine
  modified_base 36: mod_base = OTHER; note = 2'-O-methyl adenosine
  modified_base 37: mod_base = OTHER; note = 2'-O-methyl uridine
  modified_base 38: mod_base = OTHER; note = 2'-O-methyl adenosine
  modified_base 39: mod_base = OTHER; note = 2'-O-methyl guanosine
  modified_base 40: mod_base = OTHER; note = 2'-O-methyl cytidine
  modified_base 69: mod_base = OTHER; note = 2'-O-methyl adenosine
  modified_base 70: mod_base = OTHER; note = 2'-O-methyl cytidine
  modified_base 71: mod_base = OTHER; note = 2'-O-methyl uridine
  modified_base 72: mod_base = OTHER; note = 2'-O-methyl uridine
  modified_base 73: mod_base = OTHER; note = 2'-O-methyl guanosine
  modified_base 74: mod_base = OTHER; note = 2'-O-methyl adenosine
  modified_base 75: mod_base = OTHER; note = 2'-O-methyl adenosine
  modified_base 76: mod_base = OTHER; note = 2'-O-methyl adenosine
  modified_base 77: mod_base = OTHER; note = 2'-O-methyl adenosine
  modified_base 78: mod_base = OTHER; note = 2'-O-methyl adenosine
  modified_base 79: mod_base = OTHER; note = 2'-O-methyl guanosine
  modified_base 80: mod_base = OTHER; note = 2'-O-methyl uridine
  modified_base 81: mod_base = OTHER; note = 2'-O-methyl guanosine
  modified_base 82: mod_base = OTHER; note = 2'-O-methyl guanosine
  modified_base 83: mod_base = OTHER; note = 2'-O-methyl cytidine
  modified_base 84: mod_base = OTHER; note = 2'-O-methyl adenosine
  modified_base 85: mod_base = OTHER; note = 2'-O-methyl cytidine
  modified_base 86: mod_base = OTHER; note = 2'-O-methyl cytidine
  modified_base 87: mod_base = OTHER; note = 2'-O-methyl guanosine
  modified_base 88: mod_base = OTHER; note = 2'-O-methyl adenosine
  modified_base 89: mod_base = OTHER; note = 2'-O-methyl guanosine
  modified_base 90: mod_base = OTHER; note = 2'-O-methyl uridine
  modified_base 91: mod_base = OTHER; note = 2'-O-methyl cytidine
  modified_base 92: mod_base = OTHER; note = 2'-O-methyl guanosine
  modified_base 93: mod_base = OTHER; note = 2'-O-methyl guanosine
  modified_base 94: mod_base = OTHER; note = 2'-O-methyl uridine
  modified_base 95: mod_base = OTHER; note = 2'-O-methyl guanosine
  modified_base 96: mod_base = OTHER; note = 2'-O-methyl cytidine
  modified_base 117: mod_base = OTHER; note = guanosine phosphorothioate
  modified_base 118: mod_base = OTHER; note = 2'-O-methyl guanosine phosphorothioate
  modified_base 119: mod_base = OTHER; note = 2'-O-methyl uridine phosphorothioate
  modified_base 120: mod_base = OTHER; note = 2'-O-methyl guanosine
catggtgcacctgactcctggttttagagctagaaatagcaagttaaaataaggctagtccgttatcaacttgaaaaagtggcaccgagtcggtgcagatttttctgccggagtcaggtg

SEQ ID NO: 20855 - RNA, 120 nt, synthetic construct
  source 1..120: mol_type = other RNA
  modified_base 1: mod_base = OTHER; note = 2'-O-methyl cytidine phosphorothioate
  modified_base 2: mod_base = OTHER; note = 2'-O-methyl adenosine phosphorothioate
  modified_base 3: mod_base = OTHER; note = 2'-O-methyl uridine phosphorothioate
  modified_base 29: mod_base = OTHER; note = 2'-O-methyl guanosine
  modified_base 30: mod_base = OTHER; note = 2'-O-methyl cytidine
  modified_base 31: mod_base = OTHER; note = 2'-O-methyl uridine
  modified_base 32: mod_base = OTHER; note = 2'-O-methyl adenosine
  modified_base 33: mod_base = OTHER; note = 2'-O-methyl guanosine
  modified_base 34: mod_base = OTHER; note = 2'-O-methyl adenosine
  modified_base 35: mod_base = OTHER; note = 2'-O-methyl adenosine
  modified_base 36: mod_base = OTHER; note = 2'-O-methyl adenosine
  modified_base 37: mod_base = OTHER; note = 2'-O-methyl uridine
  modified_base 38: mod_base = OTHER; note = 2'-O-methyl adenosine
  modified_base 39: mod_base = OTHER; note = 2'-O-methyl guanosine
  modified_base 40: mod_base = OTHER; note = 2'-O-methyl cytidine
  modified_base 69: mod_base = OTHER; note = 2'-O-methyl adenosine
  modified_base 70: mod_base = OTHER; note = 2'-O-methyl cytidine
  modified_base 71: mod_base = OTHER; note = 2'-O-methyl uridine
  modified_base 72: mod_base = OTHER; note = 2'-O-methyl uridine
  modified_base 73: mod_base = OTHER; note = 2'-O-methyl guanosine
  modified_base 74: mod_base = OTHER; note = 2'-O-methyl adenosine
  modified_base 75: mod_base = OTHER; note = 2'-O-methyl adenosine
  modified_base 76: mod_base = OTHER; note = 2'-O-methyl adenosine
  modified_base 77: mod_base = OTHER; note = 2'-O-methyl adenosine
  modified_base 78: mod_base = OTHER; note = 2'-O-methyl adenosine
  modified_base 79: mod_base = OTHER; note = 2'-O-methyl guanosine
  modified_base 80: mod_base = OTHER; note = 2'-O-methyl uridine
  modified_base 81: mod_base = OTHER; note = 2'-O-methyl guanosine
  modified_base 82: mod_base = OTHER; note = 2'-O-methyl guanosine
  modified_base 83: mod_base = OTHER; note = 2'-O-methyl cytidine
  modified_base 84: mod_base = OTHER; note = 2'-O-methyl adenosine
  modified_base 85: mod_base = OTHER; note = 2'-O-methyl cytidine
  modified_base 86: mod_base = OTHER; note = 2'-O-methyl cytidine
  modified_base 87: mod_base = OTHER; note = 2'-O-methyl guanosine
  modified_base 88: mod_base = OTHER; note = 2'-O-methyl adenosine
  modified_base 89: mod_base = OTHER; note = 2'-O-methyl guanosine
  modified_base 90: mod_base = OTHER; note = 2'-O-methyl uridine
  modified_base 91: mod_base = OTHER; note = 2'-O-methyl cytidine
  modified_base 92: mod_base = OTHER; note = 2'-O-methyl guanosine
  modified_base 93: mod_base = OTHER; note = 2'-O-methyl guanosine
  modified_base 94: mod_base = OTHER; note = 2'-O-methyl uridine
  modified_base 95: mod_base = OTHER; note = 2'-O-methyl guanosine
  modified_base 96: mod_base = OTHER; note = 2'-O-methyl cytidine
  modified_base 117: mod_base = OTHER; note = guanosine phosphorothioate
  modified_base 118: mod_base = OTHER; note = 2'-O-methyl guanosine phosphorothioate
  modified_base 119: mod_base = OTHER; note = 2'-O-methyl uridine phosphorothioate
  modified_base 120: mod_base = OTHER; note = 2'-O-methyl guanosine
catggtgcacctgactcctggttttagagctagaaatagcaagttaaaataaggctagtccgttatcaacttgaaaaagtggcaccgagtcggtgcagatttttctgcgggagtcaggtg

SEQ ID NO: 20856 - RNA, 120 nt, synthetic construct
  source 1..120: mol_type = other RNA
  modified_base 1: mod_base = OTHER; note = 2'-O-methyl cytidine phosphorothioate
  modified_base 2: mod_base = OTHER; note = 2'-O-methyl adenosine phosphorothioate
  modified_base 3: mod_base = OTHER; note = 2'-O-methyl uridine phosphorothioate
  modified_base 29: mod_base = OTHER; note = 2'-O-methyl guanosine
  modified_base 30: mod_base = OTHER; note = 2'-O-methyl cytidine
  modified_base 31: mod_base = OTHER; note = 2'-O-methyl uridine
  modified_base 32: mod_base = OTHER; note = 2'-O-methyl adenosine
  modified_base 33: mod_base = OTHER; note = 2'-O-methyl guanosine
  modified_base 34: mod_base = OTHER; note = 2'-O-methyl adenosine
  modified_base 35: mod_base = OTHER; note = 2'-O-methyl adenosine
  modified_base 36: mod_base = OTHER; note = 2'-O-methyl adenosine
  modified_base 37: mod_base = OTHER; note = 2'-O-methyl uridine
  modified_base 38: mod_base = OTHER; note = 2'-O-methyl adenosine
  modified_base 39: mod_base = OTHER; note = 2'-O-methyl guanosine
  modified_base 40: mod_base = OTHER; note = 2'-O-methyl cytidine
  modified_base 69: mod_base = OTHER; note = 2'-O-methyl adenosine
  modified_base 70: mod_base = OTHER; note = 2'-O-methyl cytidine
  modified_base 71: mod_base = OTHER; note = 2'-O-methyl uridine
  modified_base 72: mod_base = OTHER; note = 2'-O-methyl uridine
  modified_base 73: mod_base = OTHER; note = 2'-O-methyl guanosine
  modified_base 74: mod_base = OTHER; note = 2'-O-methyl adenosine
  modified_base 75: mod_base = OTHER; note = 2'-O-methyl adenosine
  modified_base 76: mod_base = OTHER; note = 2'-O-methyl adenosine
  modified_base 77: mod_base = OTHER; note = 2'-O-methyl adenosine
  modified_base 78: mod_base = OTHER; note = 2'-O-methyl adenosine
  modified_base 79: mod_base = OTHER; note = 2'-O-methyl guanosine
  modified_base 80: mod_base = OTHER; note = 2'-O-methyl uridine
  modified_base 81: mod_base = OTHER; note = 2'-O-methyl guanosine
  modified_base 82: mod_base = OTHER; note = 2'-O-methyl guanosine
  modified_base 83: mod_base = OTHER; note = 2'-O-methyl cytidine
  modified_base 84: mod_base = OTHER; note = 2'-O-methyl adenosine
  modified_base 85: mod_base = OTHER; note = 2'-O-methyl cytidine
  modified_base 86: mod_base = OTHER; note = 2'-O-methyl cytidine
  modified_base 87: mod_base = OTHER; note = 2'-O-methyl guanosine
  modified_base 88: mod_base = OTHER; note = 2'-O-methyl adenosine
  modified_base 89: mod_base = OTHER; note = 2'-O-methyl guanosine
  modified_base 90: mod_base = OTHER; note = 2'-O-methyl uridine
  modified_base 91: mod_base = OTHER; note = 2'-O-methyl cytidine
  modified_base 92: mod_base = OTHER; note = 2'-O-methyl guanosine
  modified_base 93: mod_base = OTHER; note = 2'-O-methyl guanosine
  modified_base 94: mod_base = OTHER; note = 2'-O-methyl uridine
  modified_base 95: mod_base = OTHER; note = 2'-O-methyl guanosine
  modified_base 96: mod_base = OTHER; note = 2'-O-methyl cytidine
  modified_base 117: mod_base = OTHER; note = guanosine phosphorothioate
  modified_base 118: mod_base = OTHER; note = 2'-O-methyl guanosine phosphorothioate
  modified_base 119: mod_base = OTHER; note = 2'-O-methyl uridine phosphorothioate
  modified_base 120: mod_base = OTHER; note = 2'-O-methyl guanosine
catggtgcacctgactcctggttttagagctagaaatagcaagttaaaataaggctagtccgttatcaacttgaaaaagtggcaccgagtcggtgcagatttttctgctggagtcaggtg

SEQ ID NO: 20857 - RNA, 124 nt, synthetic construct; identical to SEQ ID NO: 20611
  source 1..124: mol_type = other RNA
  modified_base 1: mod_base = OTHER; note = 2'-O-methyl cytidine phosphorothioate
  modified_base 2: mod_base = OTHER; note = 2'-O-methyl adenosine phosphorothioate
  modified_base 3: mod_base = OTHER; note = 2'-O-methyl uridine phosphorothioate
  modified_base 29: mod_base = OTHER; note = 2'-O-methyl guanosine
  modified_base 30: mod_base = OTHER; note = 2'-O-methyl cytidine
  modified_base 31: mod_base = OTHER; note = 2'-O-methyl uridine
  modified_base 32: mod_base = OTHER; note = 2'-O-methyl adenosine
  modified_base 33: mod_base = OTHER; note = 2'-O-methyl guanosine
  modified_base 34: mod_base = OTHER; note = 2'-O-methyl adenosine
  modified_base 35: mod_base = OTHER; note = 2'-O-methyl adenosine
  modified_base 36: mod_base = OTHER; note = 2'-O-methyl adenosine
  modified_base 37: mod_base = OTHER; note = 2'-O-methyl uridine
  modified_base 38: mod_base = OTHER; note = 2'-O-methyl adenosine
  modified_base 39: mod_base = OTHER; note = 2'-O-methyl guanosine
  modified_base 40: mod_base = OTHER; note = 2'-O-methyl cytidine
  modified_base 69: mod_base = OTHER; note = 2'-O-methyl adenosine
  modified_base 70: mod_base = OTHER; note = 2'-O-methyl cytidine
  modified_base 71: mod_base = OTHER; note = 2'-O-methyl uridine
  modified_base 72: mod_base = OTHER; note = 2'-O-methyl uridine
  modified_base 73: mod_base = OTHER; note = 2'-O-methyl guanosine
  modified_base 74: mod_base = OTHER; note = 2'-O-methyl adenosine
  modified_base 75: mod_base = OTHER; note = 2'-O-methyl adenosine
  modified_base 76: mod_base = OTHER; note = 2'-O-methyl adenosine
  modified_base 77: mod_base = OTHER; note = 2'-O-methyl adenosine
  modified_base 78: mod_base = OTHER; note = 2'-O-methyl adenosine
  modified_base 79: mod_base = OTHER; note = 2'-O-methyl guanosine
  modified_base 80: mod_base = OTHER; note = 2'-O-methyl uridine
  modified_base 81: mod_base = OTHER; note = 2'-O-methyl guanosine
  modified_base 82: mod_base = OTHER; note = 2'-O-methyl guanosine
  modified_base 83: mod_base = OTHER; note = 2'-O-methyl cytidine
  modified_base 84: mod_base = OTHER; note = 2'-O-methyl adenosine
  modified_base 85: mod_base = OTHER; note = 2'-O-methyl cytidine
  modified_base 86: mod_base = OTHER; note = 2'-O-methyl cytidine
  modified_base 87: mod_base = OTHER; note = 2'-O-methyl guanosine
  modified_base 88: mod_base = OTHER; note = 2'-O-methyl adenosine
  modified_base 89: mod_base = OTHER; note = 2'-O-methyl guanosine
  modified_base 90: mod_base = OTHER; note = 2'-O-methyl uridine
  modified_base 91: mod_base = OTHER; note = 2'-O-methyl cytidine
  modified_base 92: mod_base = OTHER; note = 2'-O-methyl guanosine
  modified_base 93: mod_base = OTHER; note = 2'-O-methyl guanosine
  modified_base 94: mod_base = OTHER; note = 2'-O-methyl uridine
  modified_base 95: mod_base = OTHER; note = 2'-O-methyl guanosine
  modified_base 96: mod_base = OTHER; note = 2'-O-methyl cytidine
  modified_base 121: mod_base = OTHER; note = guanosine phosphorothioate
  modified_base 122: mod_base = OTHER; note = 2'-O-methyl uridine phosphorothioate
  modified_base 123: mod_base = OTHER; note = 2'-O-methyl guanosine phosphorothioate
  modified_base 124: mod_base = OTHER; note = 2'-O-methyl cytidine

SEQ ID NO: 20858 - RNA, 124 nt, synthetic construct
  source 1..124: mol_type = other RNA
  modified_base 1: mod_base = OTHER; note = 2'-O-methyl cytidine phosphorothioate
  modified_base 2: mod_base = OTHER; note = 2'-O-methyl adenosine phosphorothioate
  modified_base 3: mod_base = OTHER; note = 2'-O-methyl uridine phosphorothioate
  modified_base 29: mod_base = OTHER; note = 2'-O-methyl guanosine
  modified_base 30: mod_base = OTHER; note = 2'-O-methyl cytidine
  modified_base 31: mod_base = OTHER; note = 2'-O-methyl uridine
  modified_base 32: mod_base = OTHER; note = 2'-O-methyl adenosine
  modified_base 33: mod_base = OTHER; note = 2'-O-methyl guanosine
  modified_base 34: mod_base = OTHER; note = 2'-O-methyl adenosine
  modified_base 35: mod_base = OTHER; note = 2'-O-methyl adenosine
  modified_base 36: mod_base = OTHER; note = 2'-O-methyl adenosine
  modified_base 37: mod_base = OTHER; note = 2'-O-methyl uridine
  modified_base 38: mod_base = OTHER; note = 2'-O-methyl adenosine
  modified_base 39: mod_base = OTHER; note = 2'-O-methyl guanosine
  modified_base 40: mod_base = OTHER; note = 2'-O-methyl cytidine
  modified_base 69: mod_base = OTHER; note = 2'-O-methyl adenosine
  modified_base 70: mod_base = OTHER; note = 2'-O-methyl cytidine
  modified_base 71: mod_base = OTHER; note = 2'-O-methyl uridine
  modified_base 72: mod_base = OTHER; note = 2'-O-methyl uridine
  modified_base 73: mod_base = OTHER; note = 2'-O-methyl guanosine
  modified_base 74: mod_base = OTHER; note = 2'-O-methyl adenosine
  modified_base 75: mod_base = OTHER; note = 2'-O-methyl adenosine
  modified_base 76: mod_base = OTHER; note = 2'-O-methyl adenosine
  modified_base 77: mod_base = OTHER; note = 2'-O-methyl adenosine
  modified_base 78: mod_base = OTHER; note = 2'-O-methyl adenosine
  modified_base 79: mod_base = OTHER; note = 2'-O-methyl guanosine
  modified_base 80: mod_base = OTHER; note = 2'-O-methyl uridine
  modified_base 81: mod_base = OTHER; note = 2'-O-methyl guanosine
  modified_base 82: mod_base = OTHER; note = 2'-O-methyl guanosine
  modified_base 83: mod_base = OTHER; note = 2'-O-methyl cytidine
  modified_base 84: mod_base = OTHER; note = 2'-O-methyl adenosine
  modified_base 85: mod_base = OTHER; note = 2'-O-methyl cytidine
  modified_base 86: mod_base = OTHER; note = 2'-O-methyl cytidine
  modified_base 87: mod_base = OTHER; note = 2'-O-methyl guanosine
  modified_base 88: mod_base = OTHER; note = 2'-O-methyl adenosine
  modified_base 89: mod_base = OTHER; note = 2'-O-methyl guanosine
  modified_base 90: mod_base = OTHER; note = 2'-O-methyl uridine
  modified_base 91: mod_base = OTHER; note = 2'-O-methyl cytidine
  modified_base 92: mod_base = OTHER; note = 2'-O-methyl guanosine
  modified_base 93: mod_base = OTHER; note = 2'-O-methyl guanosine
  modified_base 94: mod_base = OTHER; note = 2'-O-methyl uridine
  modified_base 95: mod_base = OTHER; note = 2'-O-methyl guanosine
  modified_base 96: mod_base = OTHER; note = 2'-O-methyl cytidine
  modified_base 121: mod_base = OTHER; note = guanosine phosphorothioate
  modified_base 122: mod_base = OTHER; note = 2'-O-methyl uridine phosphorothioate
  modified_base 123: mod_base = OTHER; note = 2'-O-methyl guanosine phosphorothioate
  modified_base 124: mod_base = OTHER; note = 2'-O-methyl cytidine
catggtgcacctgactcctggttttagagctagaaatagcaagttaaaataaggctagtccgttatcaacttgaaaaagtggcaccgagtcggtgcggcagacttctctgccggagtcaggtgc

SEQ ID NO: 20859 - RNA, 124 nt, synthetic construct
  source 1..124: mol_type = other RNA
  modified_base 1: mod_base = OTHER; note = 2'-O-methyl cytidine phosphorothioate
  modified_base 2: mod_base = OTHER; note = 2'-O-methyl adenosine phosphorothioate
  modified_base 3: mod_base = OTHER; note = 2'-O-methyl uridine phosphorothioate
  modified_base 29: mod_base = OTHER; note = 2'-O-methyl guanosine
  modified_base 30: mod_base = OTHER; note = 2'-O-methyl cytidine
  modified_base 31: mod_base = OTHER; note = 2'-O-methyl uridine
  modified_base 32: mod_base = OTHER; note = 2'-O-methyl adenosine
  modified_base 33: mod_base = OTHER; note = 2'-O-methyl guanosine
  modified_base 34: mod_base = OTHER; note = 2'-O-methyl adenosine
  modified_base 35: mod_base = OTHER; note = 2'-O-methyl adenosine
  modified_base 36: mod_base = OTHER; note = 2'-O-methyl adenosine
  modified_base 37: mod_base = OTHER; note = 2'-O-methyl uridine
  modified_base 38: mod_base = OTHER; note = 2'-O-methyl adenosine
  modified_base 39: mod_base = OTHER; note = 2'-O-methyl guanosine
  modified_base 40: mod_base = OTHER; note = 2'-O-methyl cytidine
  modified_base 69: mod_base = OTHER; note = 2'-O-methyl adenosine
  modified_base 70: mod_base = OTHER; note = 2'-O-methyl cytidine
  modified_base 71: mod_base = OTHER; note = 2'-O-methyl uridine
  modified_base 72: mod_base = OTHER; note = 2'-O-methyl uridine
  modified_base 73: mod_base = OTHER; note = 2'-O-methyl guanosine
  modified_base 74: mod_base = OTHER; note = 2'-O-methyl adenosine
  modified_base 75: mod_base = OTHER; note = 2'-O-methyl adenosine
  modified_base 76: mod_base = OTHER; note = 2'-O-methyl adenosine
  modified_base 77: mod_base = OTHER; note = 2'-O-methyl adenosine
  modified_base 78: mod_base = OTHER; note = 2'-O-methyl adenosine
  modified_base 79: mod_base = OTHER; note = 2'-O-methyl guanosine
  modified_base 80: mod_base = OTHER; note = 2'-O-methyl uridine
  modified_base 81: mod_base = OTHER; note = 2'-O-methyl guanosine
  modified_base 82: mod_base = OTHER; note = 2'-O-methyl guanosine
  modified_base 83: mod_base = OTHER; note = 2'-O-methyl cytidine
  modified_base 84: mod_base = OTHER; note = 2'-O-methyl adenosine
  modified_base 85: mod_base = OTHER; note = 2'-O-methyl cytidine
  modified_base 86: mod_base = OTHER; note = 2'-O-methyl cytidine
  modified_base 87: mod_base = OTHER; note = 2'-O-methyl guanosine
  modified_base 88: mod_base = OTHER; note = 2'-O-methyl adenosine
  modified_base 89: mod_base = OTHER; note = 2'-O-methyl guanosine
  modified_base 90: mod_base = OTHER; note = 2'-O-methyl uridine
  modified_base 91: mod_base = OTHER; note = 2'-O-methyl cytidine
  modified_base 92: mod_base = OTHER; note = 2'-O-methyl guanosine
  modified_base 93: mod_base = OTHER; note = 2'-O-methyl guanosine
  modified_base 94: mod_base = OTHER; note = 2'-O-methyl uridine
  modified_base 95: mod_base = OTHER; note = 2'-O-methyl guanosine
  modified_base 96: mod_base = OTHER; note = 2'-O-methyl cytidine
  modified_base 121: mod_base = OTHER; note = guanosine phosphorothioate
  modified_base 122: mod_base = OTHER; note = 2'-O-methyl uridine phosphorothioate
  modified_base 123: mod_base = OTHER; note = 2'-O-methyl guanosine phosphorothioate
  modified_base 124: mod_base = OTHER; note = 2'-O-methyl cytidine
catggtgcacctgactcctggttttagagctagaaatagcaagttaaaataaggctagtccgttatcaacttgaaaaagtggcaccgagtcggtgcggcagacttctctgcgggagtcaggtgc

SEQ ID NO: 20860 - RNA, 124 nt, synthetic construct
  source 1..124: mol_type = other RNA
  modified_base 1: mod_base = OTHER; note = 2'-O-methyl cytidine phosphorothioate
  modified_base 2: mod_base = OTHER; note = 2'-O-methyl adenosine phosphorothioate
  modified_base 3: mod_base = OTHER; note = 2'-O-methyl uridine phosphorothioate
  modified_base 29: mod_base = OTHER; note = 2'-O-methyl guanosine
  modified_base 30: mod_base = OTHER; note = 2'-O-methyl cytidine
  modified_base 31: mod_base = OTHER; note = 2'-O-methyl uridine
  modified_base 32: mod_base = OTHER; note = 2'-O-methyl adenosine
  modified_base 33: mod_base = OTHER; note = 2'-O-methyl guanosine
  modified_base 34: mod_base = OTHER; note = 2'-O-methyl adenosine
  modified_base 35: mod_base = OTHER; note = 2'-O-methyl adenosine
  modified_base 36: mod_base = OTHER; note = 2'-O-methyl adenosine
  modified_base 37: mod_base = OTHER; note = 2'-O-methyl uridine
  modified_base 38: mod_base = OTHER; note = 2'-O-methyl adenosine
  modified_base 39: mod_base = OTHER; note = 2'-O-methyl guanosine
  modified_base 40: mod_base = OTHER; note = 2'-O-methyl cytidine
  modified_base 69: mod_base = OTHER; note = 2'-O-methyl adenosine
  modified_base 70: mod_base = OTHER; note = 2'-O-methyl cytidine
  modified_base 71: mod_base = OTHER; note = 2'-O-methyl uridine
  modified_base 72: mod_base = OTHER; note = 2'-O-methyl uridine
  modified_base 73: mod_base = OTHER; note = 2'-O-methyl guanosine
  modified_base 74: mod_base = OTHER; note = 2'-O-methyl adenosine
  modified_base 75: mod_base = OTHER; note = 2'-O-methyl adenosine
  modified_base 76: mod_base = OTHER; note = 2'-O-methyl adenosine
  modified_base 77: mod_base = OTHER; note = 2'-O-methyl adenosine
  modified_base 78: mod_base = OTHER; note = 2'-O-methyl adenosine
  modified_base 79: mod_base = OTHER; note = 2'-O-methyl guanosine
  modified_base 80: mod_base = OTHER; note = 2'-O-methyl uridine
  modified_base 81: mod_base = OTHER; note = 2'-O-methyl guanosine
  modified_base 82: mod_base = OTHER; note = 2'-O-methyl guanosine
  modified_base 83: mod_base = OTHER; note = 2'-O-methyl cytidine
  modified_base 84: mod_base = OTHER; note = 2'-O-methyl adenosine
  modified_base 85: mod_base = OTHER; note = 2'-O-methyl cytidine
  modified_base 86: mod_base = OTHER; note = 2'-O-methyl cytidine
  modified_base 87: mod_base = OTHER; note = 2'-O-methyl guanosine
  modified_base 88: mod_base = OTHER; note = 2'-O-methyl adenosine
  modified_base 89: mod_base = OTHER; note = 2'-O-methyl guanosine
  modified_base 90: mod_base = OTHER; note = 2'-O-methyl uridine
  modified_base 91: mod_base = OTHER; note = 2'-O-methyl cytidine
  modified_base 92: mod_base = OTHER; note = 2'-O-methyl guanosine
  modified_base 93: mod_base = OTHER; note = 2'-O-methyl guanosine
  modified_base 94: mod_base = OTHER; note = 2'-O-methyl uridine
  modified_base 95: mod_base = OTHER; note = 2'-O-methyl guanosine
  modified_base 96: mod_base = OTHER; note = 2'-O-methyl cytidine
  modified_base 121: mod_base = OTHER; note = guanosine phosphorothioate
  modified_base 122: mod_base = OTHER; note = 2'-O-methyl uridine phosphorothioate
  modified_base 123: mod_base = OTHER; note = 2'-O-methyl guanosine phosphorothioate
  modified_base 124: mod_base = OTHER; note = 2'-O-methyl cytidine
catggtgcacctgactcctggttttagagctagaaatagcaagttaaaataaggctagtccgttatcaacttgaaaaagtggcaccgagtcggtgcggcagacttctctgctggagtcaggtgc

SEQ ID NO: 20861 - RNA, 124 nt, synthetic construct
  source 1..124: mol_type = other RNA
  modified_base 1: mod_base = OTHER; note = 2'-O-methyl cytidine phosphorothioate
  modified_base 2: mod_base = OTHER; note = 2'-O-methyl adenosine phosphorothioate
  modified_base 3: mod_base = OTHER; note = 2'-O-methyl uridine phosphorothioate
  modified_base 29: mod_base = OTHER; note = 2'-O-methyl guanosine
  modified_base 30: mod_base = OTHER; note = 2'-O-methyl cytidine
  modified_base 31: mod_base = OTHER; note = 2'-O-methyl uridine
  modified_base 32: mod_base = OTHER; note = 2'-O-methyl adenosine
  modified_base 33: mod_base = OTHER; note = 2'-O-methyl guanosine
  modified_base 34: mod_base = OTHER; note = 2'-O-methyl adenosine
  modified_base 35: mod_base = OTHER; note = 2'-O-methyl adenosine
  modified_base 36: mod_base = OTHER; note = 2'-O-methyl adenosine
  modified_base 37: mod_base = OTHER; note = 2'-O-methyl uridine
  modified_base 38: mod_base = OTHER; note = 2'-O-methyl adenosine
  modified_base 39: mod_base = OTHER; note = 2'-O-methyl guanosine
  modified_base 40: mod_base = OTHER; note = 2'-O-methyl cytidine
  modified_base 69: mod_base = OTHER; note = 2'-O-methyl adenosine
  modified_base 70: mod_base = OTHER; note = 2'-O-methyl cytidine
  modified_base 71: mod_base = OTHER; note = 2'-O-methyl uridine
  modified_base 72: mod_base = OTHER; note = 2'-O-methyl uridine
  modified_base 73: mod_base = OTHER; note = 2'-O-methyl guanosine
  modified_base 74: mod_base = OTHER; note = 2'-O-methyl adenosine
  modified_base 75: mod_base = OTHER; note = 2'-O-methyl adenosine
  modified_base 76: mod_base = OTHER; note = 2'-O-methyl adenosine
  modified_base 77: mod_base = OTHER; note = 2'-O-methyl adenosine
  modified_base 78: mod_base = OTHER; note = 2'-O-methyl adenosine
  modified_base 79: mod_base = OTHER; note = 2'-O-methyl guanosine
  modified_base 80: mod_base = OTHER; note = 2'-O-methyl uridine
  modified_base 81: mod_base = OTHER; note = 2'-O-methyl guanosine
  modified_base 82: mod_base = OTHER; note = 2'-O-methyl guanosine
  modified_base 83: mod_base = OTHER; note = 2'-O-methyl cytidine
  modified_base 84: mod_base = OTHER; note = 2'-O-methyl adenosine
  modified_base 85: mod_base = OTHER; note = 2'-O-methyl cytidine
  modified_base 86: mod_base = OTHER; note = 2'-O-methyl cytidine
  modified_base 87: mod_base = OTHER; note = 2'-O-methyl guanosine
  modified_base 88: mod_base = OTHER; note = 2'-O-methyl adenosine
  modified_base 89: mod_base = OTHER; note = 2'-O-methyl guanosine
  modified_base 90: mod_base = OTHER; note = 2'-O-methyl uridine
  modified_base 91: mod_base = OTHER; note = 2'-O-methyl cytidine
  modified_base 92: mod_base = OTHER; note = 2'-O-methyl guanosine
  modified_base 93: mod_base = OTHER; note = 2'-O-methyl guanosine
  modified_base 94: mod_base = OTHER; note = 2'-O-methyl uridine
  modified_base 95: mod_base = OTHER; note = 2'-O-methyl guanosine
  modified_base 96: mod_base = OTHER; note = 2'-O-methyl cytidine
  modified_base 121: mod_base = OTHER; note = guanosine phosphorothioate
  modified_base 122: mod_base = OTHER; note = 2'-O-methyl uridine phosphorothioate
  modified_base 123: mod_base = OTHER; note = 2'-O-methyl guanosine phosphorothioate
  modified_base 124: mod_base = OTHER; note = 2'-O-methyl cytidine
catggtgcacctgactcctggttttagagctagaaatagcaagttaaaataaggctagtccgttatcaacttgaaaaagtggcaccgagtcggtgcggcagatttctctgcaggagtcaggtgc

SEQ ID NO: 20862 - RNA, 124 nt, synthetic construct
  source 1..124: mol_type = other RNA
  modified_base 1: mod_base = OTHER; note = 2'-O-methyl cytidine phosphorothioate
  modified_base 2: mod_base = OTHER; note = 2'-O-methyl adenosine phosphorothioate
  modified_base 3: mod_base = OTHER; note = 2'-O-methyl uridine phosphorothioate
  modified_base 29: mod_base = OTHER; note = 2'-O-methyl guanosine
  modified_base 30: mod_base = OTHER; note = 2'-O-methyl cytidine
  modified_base 31: mod_base = OTHER; note = 2'-O-methyl uridine
  modified_base 32: mod_base = OTHER; note = 2'-O-methyl adenosine
  modified_base 33: mod_base = OTHER; note = 2'-O-methyl guanosine
  modified_base 34: mod_base = OTHER; note = 2'-O-methyl adenosine
  modified_base 35: mod_base = OTHER; note = 2'-O-methyl adenosine
  modified_base 36: mod_base = OTHER; note = 2'-O-methyl adenosine
  modified_base 37: mod_base = OTHER; note = 2'-O-methyl uridine
  modified_base 38: mod_base = OTHER; note = 2'-O-methyl adenosine
  modified_base 39: mod_base = OTHER; note = 2'-O-methyl guanosine
  modified_base 40: mod_base = OTHER; note = 2'-O-methyl cytidine
  modified_base 69: mod_base = OTHER; note = 2'-O-methyl adenosine
  modified_base 70: mod_base = OTHER; note = 2'-O-methyl cytidine
  modified_base 71: mod_base = OTHER; note = 2'-O-methyl uridine
  modified_base 72: mod_base = OTHER; note = 2'-O-methyl uridine
  modified_base 73: mod_base = OTHER; note = 2'-O-methyl guanosine
  modified_base 74: mod_base = OTHER; note = 2'-O-methyl adenosine
  modified_base 75: mod_base = OTHER; note = 2'-O-methyl adenosine
  modified_base 76: mod_base = OTHER; note = 2'-O-methyl adenosine
  modified_base 77: mod_base = OTHER; note = 2'-O-methyl adenosine
  modified_base 78: mod_base = OTHER; note = 2'-O-methyl adenosine
  modified_base 79: mod_base = OTHER; note = 2'-O-methyl guanosine
  modified_base 80: mod_base = OTHER; note = 2'-O-methyl uridine
  modified_base 81: mod_base = OTHER; note = 2'-O-methyl guanosine
  modified_base 82: mod_base = OTHER; note = 2'-O-methyl guanosine
  modified_base 83: mod_base = OTHER; note = 2'-O-methyl cytidine
  modified_base 84: mod_base = OTHER; note = 2'-O-methyl adenosine
  modified_base 85: mod_base = OTHER; note = 2'-O-methyl cytidine
  modified_base 86: mod_base = OTHER; note = 2'-O-methyl cytidine
  modified_base 87: mod_base = OTHER; note = 2'-O-methyl guanosine
  modified_base 88: mod_base = OTHER; note = 2'-O-methyl adenosine
  modified_base 89: mod_base = OTHER; note = 2'-O-methyl guanosine
  modified_base 90: mod_base = OTHER; note = 2'-O-methyl uridine
  modified_base 91: mod_base = OTHER; note = 2'-O-methyl cytidine
  modified_base 92: mod_base = OTHER; note = 2'-O-methyl guanosine
  modified_base 93: mod_base = OTHER; note = 2'-O-methyl guanosine
  modified_base 94: mod_base = OTHER; note = 2'-O-methyl uridine
  modified_base 95: mod_base = OTHER; note = 2'-O-methyl guanosine
  modified_base 96: mod_base = OTHER; note = 2'-O-methyl cytidine
  modified_base 121: mod_base = OTHER; note = guanosine phosphorothioate
  modified_base 122: mod_base = OTHER; note = 2'-O-methyl uridine phosphorothioate
  modified_base 123: mod_base = OTHER; note = 2'-O-methyl guanosine phosphorothioate
  modified_base 124: mod_base = OTHER; note = 2'-O-methyl cytidine
catggtgcacctgactcctggttttagagctagaaatagcaagttaaaataaggctagtccgttatcaacttgaaaaagtggcaccgagtcggtgcggcagacttttctgcaggagtcaggtgc

SEQ ID NO: 20863 - RNA, 124 nt, synthetic construct
  source 1..124: mol_type = other RNA
  modified_base 1: mod_base = OTHER; note = 2'-O-methyl cytidine phosphorothioate
  modified_base 2: mod_base = OTHER; note = 2'-O-methyl adenosine phosphorothioate
  modified_base 3: mod_base = OTHER; note = 2'-O-methyl uridine phosphorothioate
  modified_base 29: mod_base = OTHER; note = 2'-O-methyl guanosine
  modified_base 30: mod_base = OTHER; note = 2'-O-methyl cytidine
  modified_base 31: mod_base = OTHER; note = 2'-O-methyl uridine
  modified_base 32: mod_base = OTHER; note = 2'-O-methyl adenosine
  modified_base 33: mod_base = OTHER; note = 2'-O-methyl guanosine
  modified_base 34: mod_base = OTHER; note = 2'-O-methyl adenosine
  modified_base 35: mod_base = OTHER; note = 2'-O-methyl adenosine
  modified_base 36: mod_base = OTHER; note = 2'-O-methyl adenosine
  modified_base 37: mod_base = OTHER; note = 2'-O-methyl uridine
  modified_base 38: mod_base = OTHER; note = 2'-O-methyl adenosine
  modified_base 39: mod_base = OTHER; note = 2'-O-methyl guanosine
  modified_base 40: mod_base = OTHER; note = 2'-O-methyl cytidine
  modified_base 69: mod_base = OTHER; note = 2'-O-methyl adenosine
  modified_base 70: mod_base = OTHER; note = 2'-O-methyl cytidine
  modified_base 71: mod_base = OTHER; note = 2'-O-methyl uridine
  modified_base 72: mod_base = OTHER; note = 2'-O-methyl uridine
  modified_base 73: mod_base = OTHER; note = 2'-O-methyl guanosine
  modified_base 74: mod_base = OTHER; note = 2'-O-methyl adenosine
  modified_base 75: mod_base = OTHER; note = 2'-O-methyl adenosine
  modified_base 76: mod_base = OTHER; note = 2'-O-methyl adenosine
  modified_base 77: mod_base = OTHER; note = 2'-O-methyl adenosine
  modified_base 78: mod_base = OTHER; note = 2'-O-methyl adenosine
  modified_base 79: mod_base = OTHER; note = 2'-O-methyl guanosine
  modified_base 80: mod_base = OTHER; note = 2'-O-methyl uridine
  modified_base 81: mod_base = OTHER; note = 2'-O-methyl guanosine
  modified_base 82: mod_base = OTHER; note = 2'-O-methyl guanosine
  modified_base 83: mod_base = OTHER; note = 2'-O-methyl cytidine
  modified_base 84: mod_base = OTHER; note = 2'-O-methyl adenosine
  modified_base 85: mod_base = OTHER; note = 2'-O-methyl cytidine
  modified_base 86: mod_base = OTHER; note = 2'-O-methyl cytidine
  modified_base 87: mod_base = OTHER; note = 2'-O-methyl guanosine
  modified_base 88: mod_base = OTHER; note = 2'-O-methyl adenosine
  modified_base 89: mod_base = OTHER; note = 2'-O-methyl guanosine
  modified_base 90: mod_base = OTHER; note = 2'-O-methyl uridine
  modified_base 91: mod_base = OTHER; note = 2'-O-methyl cytidine
  modified_base 92: mod_base = OTHER; note = 2'-O-methyl guanosine
  modified_base 93: mod_base = OTHER; note = 2'-O-methyl guanosine
  modified_base 94: mod_base = OTHER; note = 2'-O-methyl uridine
  modified_base 95: mod_base = OTHER; note = 2'-O-methyl guanosine
  modified_base 96: mod_base = OTHER; note = 2'-O-methyl cytidine
  modified_base 121: mod_base = OTHER; note = guanosine phosphorothioate
  modified_base 122: mod_base = OTHER; note = 2'-O-methyl uridine phosphorothioate
  modified_base 123: mod_base = OTHER; note = 2'-O-methyl guanosine phosphorothioate
  modified_base 124: mod_base = OTHER; note = 2'-O-methyl cytidine
catggtgcacctgactcctggttttagagctagaaatagcaagttaaaataaggctagtccgttatcaacttgaaaaagtggcaccgagtcggtgcggcagacttttctgccggagtcaggtgc

SEQ ID NO: 20864 - RNA, 124 nt, synthetic construct
  source 1..124: mol_type = other RNA
  modified_base 1: mod_base = OTHER; note = 2'-O-methyl cytidine phosphorothioate
  modified_base 2: mod_base = OTHER; note = 2'-O-methyl adenosine phosphorothioate
  modified_base 3: mod_base = OTHER; note = 2'-O-methyl uridine phosphorothioate
  modified_base 29: mod_base = OTHER; note = 2'-O-methyl guanosine
  modified_base 30: mod_base = OTHER; note = 2'-O-methyl cytidine
  modified_base 31: mod_base = OTHER; note = 2'-O-methyl uridine
  modified_base 32: mod_base = OTHER; note = 2'-O-methyl adenosine
  modified_base 33: mod_base = OTHER; note = 2'-O-methyl guanosine
  modified_base 34: mod_base = OTHER; note = 2'-O-methyl adenosine
  modified_base 35: mod_base = OTHER; note = 2'-O-methyl adenosine
  modified_base 36: mod_base = OTHER; note = 2'-O-methyl adenosine
  modified_base 37: mod_base = OTHER; note = 2'-O-methyl uridine
  modified_base 38: mod_base = OTHER; note = 2'-O-methyl adenosine
  modified_base 39: mod_base = OTHER; note = 2'-O-methyl guanosine
  modified_base 40: mod_base = OTHER; note = 2'-O-methyl cytidine
  modified_base 69: mod_base = OTHER; note = 2'-O-methyl adenosine
  modified_base 70: mod_base = OTHER; note = 2'-O-methyl cytidine
  modified_base 71: mod_base = OTHER; note = 2'-O-methyl uridine
  modified_base 72: mod_base = OTHER; note = 2'-O-methyl uridine
  modified_base 73: mod_base = OTHER; note = 2'-O-methyl guanosine
  modified_base 74: mod_base = OTHER; note = 2'-O-methyl adenosine
  modified_base 75: mod_base = OTHER; note = 2'-O-methyl adenosine
  modified_base 76: mod_base = OTHER; note = 2'-O-methyl adenosine
  modified_base 77: mod_base = OTHER; note = 2'-O-methyl adenosine
  modified_base 78: mod_base = OTHER; note = 2'-O-methyl adenosine
  modified_base 79: mod_base = OTHER; note = 2'-O-methyl guanosine
  modified_base 80: mod_base = OTHER; note = 2'-O-methyl uridine
  modified_base 81: mod_base = OTHER; note = 2'-O-methyl guanosine
  modified_base 82: mod_base = OTHER; note = 2'-O-methyl guanosine
  modified_base 83: mod_base = OTHER; note = 2'-O-methyl cytidine
  modified_base 84: mod_base = OTHER; note = 2'-O-methyl adenosine
  modified_base 85: mod_base = OTHER; note = 2'-O-methyl cytidine
  modified_base 86: mod_base = OTHER; note = 2'-O-methyl cytidine
  modified_base 87: mod_base = OTHER; note = 2'-O-methyl guanosine
  modified_base 88: mod_base = OTHER; note = 2'-O-methyl adenosine
  modified_base 89: mod_base = OTHER; note = 2'-O-methyl guanosine
  modified_base 90: mod_base = OTHER; note = 2'-O-methyl uridine
  modified_base 91: mod_base = OTHER; note = 2'-O-methyl cytidine
  modified_base 92: mod_base = OTHER; note = 2'-O-methyl guanosine
  modified_base 93: mod_base = OTHER; note = 2'-O-methyl guanosine
  modified_base 94: mod_base = OTHER; note = 2'-O-methyl uridine
  modified_base 95: mod_base = OTHER; note = 2'-O-methyl guanosine
  modified_base 96: mod_base = OTHER; note = 2'-O-methyl cytidine
  modified_base 121: mod_base = OTHER; note = guanosine phosphorothioate
  modified_base 122: mod_base = OTHER; note = 2'-O-methyl uridine phosphorothioate
  modified_base 123: mod_base = OTHER; note = 2'-O-methyl guanosine phosphorothioate
  modified_base 124: mod_base = OTHER; note = 2'-O-methyl cytidine
catggtgcacctgactcctggttttagagctagaaatagcaagttaaaataaggctagtccgttatcaacttgaaaaagtggcaccgagtcggtgcggcagacttttctgcgggagtcaggtgc

SEQ ID NO: 20865 - RNA, 124 nt, synthetic construct
  source 1..124: mol_type = other RNA
  modified_base 1: mod_base = OTHER; note = 2'-O-methyl cytidine phosphorothioate
  modified_base 2: mod_base = OTHER; note = 2'-O-methyl adenosine phosphorothioate
  modified_base 3: mod_base = OTHER; note = 2'-O-methyl uridine phosphorothioate
  modified_base 29: mod_base = OTHER; note = 2'-O-methyl guanosine
  modified_base 30: mod_base = OTHER; note = 2'-O-methyl cytidine
  modified_base 31: mod_base = OTHER; note = 2'-O-methyl uridine
  modified_base 32: mod_base = OTHER; note = 2'-O-methyl adenosine
  modified_base 33: mod_base = OTHER; note = 2'-O-methyl guanosine
  modified_base 34: mod_base = OTHER; note = 2'-O-methyl adenosine
  modified_base 35: mod_base = OTHER; note = 2'-O-methyl adenosine
  modified_base 36: mod_base = OTHER; note = 2'-O-methyl adenosine
  modified_base 37: mod_base = OTHER; note = 2'-O-methyl uridine
  modified_base 38: mod_base = OTHER; note = 2'-O-methyl adenosine
  modified_base 39: mod_base = OTHER; note = 2'-O-methyl guanosine
  modified_base 40: mod_base = OTHER; note = 2'-O-methyl cytidine
  modified_base 69: mod_base = OTHER; note = 2'-O-methyl adenosine
  modified_base 70: mod_base = OTHER; note = 2'-O-methyl cytidine
  modified_base 71: mod_base = OTHER; note = 2'-O-methyl uridine
  modified_base 72: mod_base = OTHER; note = 2'-O-methyl uridine
  modified_base 73: mod_base = OTHER; note = 2'-O-methyl guanosine
  modified_base 74: mod_base = OTHER; note = 2'-O-methyl adenosine
  modified_base 75: mod_base = OTHER; note = 2'-O-methyl adenosine
  modified_base 76: mod_base = OTHER; note = 2'-O-methyl adenosine
  modified_base 77: mod_base = OTHER; note = 2'-O-methyl adenosine
  modified_base 78: mod_base = OTHER; note = 2'-O-methyl adenosine
  modified_base 79: mod_base = OTHER; note = 2'-O-methyl guanosine
  modified_base 80: mod_base = OTHER; note = 2'-O-methyl uridine
  modified_base 81: mod_base = OTHER; note = 2'-O-methyl guanosine
  modified_base 82: mod_base = OTHER; note = 2'-O-methyl guanosine
  modified_base 83: mod_base = OTHER; note = 2'-O-methyl cytidine
  modified_base 84: mod_base = OTHER; note = 2'-O-methyl adenosine
  modified_base 85: mod_base = OTHER; note = 2'-O-methyl cytidine
  modified_base 86: mod_base = OTHER; note = 2'-O-methyl cytidine
  modified_base 87: mod_base = OTHER; note = 2'-O-methyl guanosine
  modified_base 88: mod_base = OTHER; note = 2'-O-methyl adenosine
  modified_base 89: mod_base = OTHER; note = 2'-O-methyl guanosine
  modified_base 90: mod_base = OTHER; note = 2'-O-methyl uridine
  modified_base 91: mod_base = OTHER; note = 2'-O-methyl cytidine
  modified_base 92: mod_base = OTHER; note = 2'-O-methyl guanosine
  modified_base 93: mod_base = OTHER; note = 2'-O-methyl guanosine
  modified_base 94: mod_base = OTHER; note = 2'-O-methyl uridine
  modified_base 95: mod_base = OTHER; note = 2'-O-methyl guanosine
  modified_base 96: mod_base = OTHER; note = 2'-O-methyl cytidine
  modified_base 121: mod_base = OTHER; note = guanosine phosphorothioate
  modified_base 122: mod_base = OTHER; note = 2'-O-methyl uridine phosphorothioate
  modified_base 123: mod_base = OTHER; note = 2'-O-methyl guanosine phosphorothioate
  modified_base 124: mod_base = OTHER; note = 2'-O-methyl cytidine
catggtgcacctgactcctggttttagagctagaaatagcaagttaaaataaggctagtccgttatcaacttgaaaaagtggcaccgagtcggtgcggcagacttttctgctggagtcaggtgc

SEQ ID NO: 20866 - RNA, 124 nt, synthetic construct
  source 1..124: mol_type = other RNA
  modified_base 1: mod_base = OTHER; note = 2'-O-methyl cytidine phosphorothioate
  modified_base 2: mod_base = OTHER; note = 2'-O-methyl adenosine phosphorothioate
  modified_base 3: mod_base = OTHER; note = 2'-O-methyl uridine phosphorothioate
  modified_base 29: mod_base = OTHER; note = 2'-O-methyl guanosine
  modified_base 30: mod_base = OTHER; note = 2'-O-methyl cytidine
  modified_base 31: mod_base = OTHER; note = 2'-O-methyl uridine
  modified_base 32: mod_base = OTHER; note = 2'-O-methyl adenosine
  modified_base 33: mod_base = OTHER; note = 2'-O-methyl guanosine
  modified_base 34: mod_base = OTHER; note = 2'-O-methyl adenosine
  modified_base 35: mod_base = OTHER; note = 2'-O-methyl adenosine
  modified_base 36: mod_base = OTHER; note = 2'-O-methyl adenosine
  modified_base 37: mod_base = OTHER; note = 2'-O-methyl uridine
  modified_base 38: mod_base = OTHER; note = 2'-O-methyl adenosine
  modified_base 39: mod_base = OTHER; note = 2'-O-methyl guanosine
  modified_base 40: mod_base = OTHER; note = 2'-O-methyl cytidine
  modified_base 69: mod_base = OTHER; note = 2'-O-methyl adenosine
  modified_base 70: mod_base = OTHER; note = 2'-O-methyl cytidine
  modified_base 71: mod_base = OTHER; note = 2'-O-methyl uridine
  modified_base 72: mod_base = OTHER; note = 2'-O-methyl uridine
  modified_base 73: mod_base = OTHER; note = 2'-O-methyl guanosine
  modified_base 74: mod_base = OTHER; note = 2'-O-methyl adenosine
  modified_base 75: mod_base = OTHER; note = 2'-O-methyl adenosine
  modified_base 76: mod_base = OTHER; note = 2'-O-methyl adenosine
  modified_base 77: mod_base = OTHER; note = 2'-O-methyl adenosine
  modified_base 78: mod_base = OTHER; note = 2'-O-methyl adenosine
  modified_base 79: mod_base = OTHER; note = 2'-O-methyl guanosine
  modified_base 80: mod_base = OTHER; note = 2'-O-methyl uridine
  modified_base 81: mod_base = OTHER; note = 2'-O-methyl guanosine
  modified_base 82: mod_base = OTHER; note = 2'-O-methyl guanosine
  modified_base 83: mod_base = OTHER; note = 2'-O-methyl cytidine
  modified_base 84: mod_base = OTHER; note = 2'-O-methyl adenosine
  modified_base 85: mod_base = OTHER; note = 2'-O-methyl cytidine
  modified_base 86: mod_base = OTHER; note = 2'-O-methyl cytidine
  modified_base 87: mod_base = OTHER; note = 2'-O-methyl guanosine
  modified_base 88: mod_base = OTHER; note = 2'-O-methyl adenosine
  modified_base 89: mod_base = OTHER; note = 2'-O-methyl guanosine
  modified_base 90: mod_base = OTHER; note = 2'-O-methyl uridine
  modified_base 91: mod_base = OTHER; note = 2'-O-methyl cytidine
  modified_base 92: mod_base = OTHER; note = 2'-O-methyl guanosine
  modified_base 93: mod_base = OTHER; note = 2'-O-methyl guanosine
  modified_base 94: mod_base = OTHER; note = 2'-O-methyl uridine
  modified_base 95: mod_base = OTHER; note = 2'-O-methyl guanosine
  modified_base 96: mod_base = OTHER; note = 2'-O-methyl cytidine
  modified_base 121: mod_base = OTHER; note = guanosine phosphorothioate
  modified_base 122: mod_base = OTHER; note = 2'-O-methyl uridine phosphorothioate
  modified_base 123: mod_base = OTHER; note = 2'-O-methyl guanosine phosphorothioate
  modified_base 124: mod_base = OTHER; note = 2'-O-methyl cytidine
catggtgcacctgactcctggttttagagctagaaatagcaagttaaaataaggctagtccgttatcaacttgaaaaagtggcaccgagtcggtgcggcagatttctctgccggagtcaggtgc

SEQ ID NO: 20867 - RNA, 124 nt, synthetic construct
  source 1..124: mol_type = other RNA
  modified_base 1: mod_base = OTHER; note = 2'-O-methyl cytidine phosphorothioate
  modified_base 2: mod_base = OTHER; note = 2'-O-methyl adenosine phosphorothioate
  modified_base 3: mod_base = OTHER; note = 2'-O-methyl uridine phosphorothioate
  modified_base 29: mod_base = OTHER; note = 2'-O-methyl guanosine
  modified_base 30: mod_base = OTHER; note = 2'-O-methyl cytidine
  modified_base 31: mod_base = OTHER; note = 2'-O-methyl uridine
  modified_base 32: mod_base = OTHER; note = 2'-O-methyl adenosine
  modified_base 33: mod_base = OTHER; note = 2'-O-methyl guanosine
  modified_base 34: mod_base = OTHER; note = 2'-O-methyl adenosine
  modified_base 35: mod_base = OTHER; note = 2'-O-methyl adenosine
  modified_base 36: mod_base = OTHER; note = 2'-O-methyl adenosine
  modified_base 37: mod_base = OTHER; note = 2'-O-methyl uridine
  modified_base 38: mod_base = OTHER; note = 2'-O-methyl adenosine
  modified_base 39: mod_base = OTHER; note = 2'-O-methyl guanosine
  modified_base 40: mod_base = OTHER; note = 2'-O-methyl cytidine
  modified_base 69: mod_base = OTHER; note = 2'-O-methyl adenosine
  modified_base 70: mod_base = OTHER; note = 2'-O-methyl cytidine
  modified_base 71: mod_base = OTHER; note = 2'-O-methyl uridine
  modified_base 72: mod_base = OTHER; note = 2'-O-methyl uridine
  modified_base 73: mod_base = OTHER; note = 2'-O-methyl guanosine
  modified_base 74: mod_base = OTHER; note = 2'-O-methyl adenosine
  modified_base 75: mod_base = OTHER; note = 2'-O-methyl adenosine
  modified_base 76: mod_base = OTHER; note = 2'-O-methyl adenosine
  modified_base 77: mod_base = OTHER; note = 2'-O-methyl adenosine
  modified_base 78: mod_base = OTHER; note = 2'-O-methyl adenosine
  modified_base 79: mod_base = OTHER; note = 2'-O-methyl guanosine
  modified_base 80: mod_base = OTHER; note = 2'-O-methyl uridine
  modified_base 81: mod_base = OTHER; note = 2'-O-methyl guanosine
  modified_base 82: mod_base = OTHER; note = 2'-O-methyl guanosine
  modified_base 83: mod_base = OTHER; note = 2'-O-methyl cytidine
  modified_base 84: mod_base = OTHER; note = 2'-O-methyl adenosine
  modified_base 85: mod_base = OTHER; note = 2'-O-methyl cytidine
  modified_base 86: mod_base = OTHER; note = 2'-O-methyl cytidine
  modified_base 87: mod_base = OTHER; note = 2'-O-methyl guanosine
  modified_base 88: mod_base = OTHER; note = 2'-O-methyl adenosine
  modified_base 89: mod_base = OTHER; note = 2'-O-methyl guanosine
  modified_base 90: mod_base = OTHER; note = 2'-O-methyl uridine
  modified_base 91: mod_base = OTHER; note = 2'-O-methyl cytidine
  modified_base 92: mod_base = OTHER; note = 2'-O-methyl guanosine
  modified_base 93: mod_base = OTHER; note = 2'-O-methyl guanosine
  modified_base 94: mod_base = OTHER; note = 2'-O-methyl uridine
  modified_base 95: mod_base = OTHER; note = 2'-O-methyl guanosine
  modified_base 96: mod_base = OTHER; note = 2'-O-methyl cytidine
  modified_base 121: mod_base = OTHER; note = guanosine phosphorothioate
  modified_base 122: mod_base = OTHER; note = 2'-O-methyl uridine phosphorothioate
  modified_base 123: mod_base = OTHER; note = 2'-O-methyl guanosine phosphorothioate
  modified_base 124: mod_base = OTHER; note = 2'-O-methyl cytidine
catggtgcacctgactcctggttttagagctagaaatagcaagttaaaataaggctagtccgttatcaacttgaaaaagtggcaccgagtcggtgcggcagatttctctgcgggagtcaggtgc

SEQ ID NO: 20868 - RNA, 124 nt, synthetic construct
  source 1..124: mol_type = other RNA
  modified_base 1: mod_base = OTHER; note = 2'-O-methyl cytidine phosphorothioate
  modified_base 2: mod_base = OTHER; note = 2'-O-methyl adenosine phosphorothioate
  modified_base 3: mod_base = OTHER; note = 2'-O-methyl uridine phosphorothioate
  modified_base 29: mod_base = OTHER; note = 2'-O-methyl guanosine
  modified_base 30: mod_base = OTHER; note = 2'-O-methyl cytidine
  modified_base 31: mod_base = OTHER; note = 2'-O-methyl uridine
  modified_base 32: mod_base = OTHER; note = 2'-O-methyl adenosine
  modified_base 33: mod_base = OTHER; note = 2'-O-methyl guanosine
  modified_base 34: mod_base = OTHER; note = 2'-O-methyl adenosine
  modified_base 35: mod_base = OTHER; note = 2'-O-methyl adenosine
  modified_base 36: mod_base = OTHER; note = 2'-O-methyl adenosine
  modified_base 37: mod_base = OTHER; note = 2'-O-methyl uridine
  modified_base 38: mod_base = OTHER; note = 2'-O-methyl adenosine
  modified_base 39: mod_base = OTHER; note = 2'-O-methyl guanosine
  modified_base 40: mod_base = OTHER; note = 2'-O-methyl cytidine
  modified_base 69: mod_base = OTHER; note = 2'-O-methyl adenosine
  modified_base 70: mod_base = OTHER; note = 2'-O-methyl cytidine
  modified_base 71: mod_base = OTHER; note = 2'-O-methyl uridine
  modified_base 72: mod_base = OTHER; note = 2'-O-methyl uridine
  modified_base 73: mod_base = OTHER; note = 2'-O-methyl guanosine
  modified_base 74: mod_base = OTHER; note = 2'-O-methyl adenosine
  modified_base 75: mod_base = OTHER; note = 2'-O-methyl adenosine
  modified_base 76: mod_base = OTHER; note = 2'-O-methyl adenosine
  modified_base 77: mod_base = OTHER; note = 2'-O-methyl adenosine
  modified_base 78: mod_base = OTHER; note = 2'-O-methyl adenosine
  modified_base 79: mod_base = OTHER; note = 2'-O-methyl guanosine
  modified_base 80: mod_base = OTHER; note = 2'-O-methyl uridine
  modified_base 81: mod_base = OTHER; note = 2'-O-methyl guanosine
  modified_base 82: mod_base = OTHER; note = 2'-O-methyl guanosine
  modified_base 83: mod_base = OTHER; note = 2'-O-methyl cytidine
  modified_base 84: mod_base = OTHER; note = 2'-O-methyl adenosine
  modified_base 85: mod_base = OTHER; note = 2'-O-methyl cytidine
  modified_base 86: mod_base = OTHER; note = 2'-O-methyl cytidine
  modified_base 87: mod_base = OTHER; note = 2'-O-methyl guanosine
  modified_base 88: mod_base = OTHER; note = 2'-O-methyl adenosine
  modified_base 89: mod_base = OTHER; note = 2'-O-methyl guanosine
  modified_base 90: mod_base = OTHER; note = 2'-O-methyl uridine
  modified_base 91: mod_base = OTHER; note = 2'-O-methyl cytidine
  modified_base 92: mod_base = OTHER; note = 2'-O-methyl guanosine
  modified_base 93: mod_base = OTHER; note = 2'-O-methyl guanosine
  modified_base 94: mod_base = OTHER; note = 2'-O-methyl uridine
  modified_base 95: mod_base = OTHER; note = 2'-O-methyl guanosine
  modified_base 96: mod_base = OTHER; note = 2'-O-methyl cytidine
  modified_base 121: mod_base = OTHER; note = guanosine phosphorothioate
  modified_base 122: mod_base = OTHER; note = 2'-O-methyl uridine phosphorothioate
  modified_base 123: mod_base = OTHER; note = 2'-O-methyl guanosine phosphorothioate
  modified_base 124: mod_base = OTHER; note = 2'-O-methyl cytidine
catggtgcacctgactcctggttttagagctagaaatagcaagttaaaataaggctagtccgttatcaacttgaaaaagtggcaccgagtcggtgcggcagatttctctgctggagtcaggtgc

SEQ ID NO: 20869 - RNA, 124 nt, synthetic construct
  source 1..124: mol_type = other RNA
  modified_base 1: mod_base = OTHER; note = 2'-O-methyl cytidine phosphorothioate
  modified_base 2: mod_base = OTHER; note = 2'-O-methyl adenosine phosphorothioate
  modified_base 3: mod_base = OTHER; note = 2'-O-methyl uridine phosphorothioate
  modified_base 29: mod_base = OTHER; note = 2'-O-methyl guanosine
  modified_base 30: mod_base = OTHER; note = 2'-O-methyl cytidine
  modified_base 31: mod_base = OTHER; note = 2'-O-methyl uridine
  modified_base 32: mod_base = OTHER; note = 2'-O-methyl adenosine
  modified_base 33: mod_base = OTHER; note = 2'-O-methyl guanosine
  modified_base 34: mod_base = OTHER; note = 2'-O-methyl adenosine
  modified_base 35: mod_base = OTHER; note = 2'-O-methyl adenosine
  modified_base 36: mod_base = OTHER; note = 2'-O-methyl adenosine
  modified_base 37: mod_base = OTHER; note = 2'-O-methyl uridine
  modified_base 38: mod_base = OTHER; note = 2'-O-methyl adenosine
  modified_base 39: mod_base = OTHER; note = 2'-O-methyl guanosine
  modified_base 40: mod_base = OTHER; note = 2'-O-methyl cytidine
  modified_base 69: mod_base = OTHER; note = 2'-O-methyl adenosine
  modified_base 70: mod_base = OTHER; note = 2'-O-methyl cytidine
  modified_base 71: mod_base = OTHER; note = 2'-O-methyl uridine
  modified_base 72: mod_base = OTHER; note = 2'-O-methyl uridine
  modified_base 73: mod_base = OTHER; note = 2'-O-methyl guanosine
  modified_base 74: mod_base = OTHER; note = 2'-O-methyl adenosine
  modified_base 75: mod_base = OTHER; note = 2'-O-methyl adenosine
  modified_base 76: mod_base = OTHER; note = 2'-O-methyl adenosine
  modified_base 77: mod_base = OTHER; note = 2'-O-methyl adenosine
  modified_base 78: mod_base = OTHER; note = 2'-O-methyl adenosine
  modified_base 79: mod_base = OTHER; note = 2'-O-methyl guanosine
  modified_base 80: mod_base = OTHER; note = 2'-O-methyl uridine
  modified_base 81: mod_base = OTHER; note = 2'-O-methyl guanosine
  modified_base 82: mod_base = OTHER; note = 2'-O-methyl guanosine
  modified_base 83: mod_base = OTHER; note = 2'-O-methyl cytidine
  modified_base 84: mod_base = OTHER; note = 2'-O-methyl adenosine
  modified_base 85: mod_base = OTHER; note = 2'-O-methyl cytidine
  modified_base 86: mod_base = OTHER; note = 2'-O-methyl cytidine
  modified_base 87: mod_base = OTHER; note = 2'-O-methyl guanosine
  modified_base 88: mod_base = OTHER; note = 2'-O-methyl adenosine
  modified_base 89: mod_base = OTHER; note = 2'-O-methyl guanosine
  modified_base 90: mod_base = OTHER; note = 2'-O-methyl uridine
  modified_base 91: mod_base = OTHER; note = 2'-O-methyl cytidine
  modified_base 92: mod_base = OTHER; note = 2'-O-methyl guanosine
  modified_base 93: mod_base = OTHER; note = 2'-O-methyl guanosine
  modified_base 94: mod_base = OTHER; note = 2'-O-methyl uridine
  modified_base 95: mod_base = OTHER; note = 2'-O-methyl guanosine
  modified_base 96: mod_base = OTHER; note = 2'-O-methyl cytidine
  modified_base 121: mod_base = OTHER; note = guanosine phosphorothioate
  modified_base 122: mod_base = OTHER; note = 2'-O-methyl uridine phosphorothioate
  modified_base 123: mod_base = OTHER; note = 2'-O-methyl guanosine phosphorothioate
  modified_base 124: mod_base = OTHER; note = 2'-O-methyl cytidine
catggtgcacctgactcctggttttagagctagaaatagcaagttaaaataaggctagtccgttatcaacttgaaaaagtggcaccgagtcggtgcggcagatttttctgcaggagtcaggtgc

SEQ ID NO: 20870 - RNA, 124 nt, synthetic construct
  source 1..124: mol_type = other RNA
  modified_base 1: mod_base = OTHER; note = 2'-O-methyl cytidine phosphorothioate
  modified_base 2: mod_base = OTHER; note = 2'-O-methyl adenosine phosphorothioate
  modified_base 3: mod_base = OTHER; note = 2'-O-methyl uridine phosphorothioate
  modified_base 29: mod_base = OTHER; note = 2'-O-methyl guanosine
  modified_base 30: mod_base = OTHER; note = 2'-O-methyl cytidine
  modified_base 31: mod_base = OTHER; note = 2'-O-methyl uridine
  modified_base 32: mod_base = OTHER; note = 2'-O-methyl adenosine
  modified_base 33: mod_base = OTHER; note = 2'-O-methyl guanosine
  modified_base 34: mod_base = OTHER; note = 2'-O-methyl adenosine
  modified_base 35: mod_base = OTHER; note = 2'-O-methyl adenosine
  modified_base 36: mod_base = OTHER; note = 2'-O-methyl adenosine
  modified_base 37: mod_base = OTHER; note = 2'-O-methyl uridine
  modified_base 38: mod_base = OTHER; note = 2'-O-methyl adenosine
  modified_base 39: mod_base = OTHER; note = 2'-O-methyl guanosine
  modified_base 40: mod_base = OTHER; note = 2'-O-methyl cytidine
  modified_base 69: mod_base = OTHER; note = 2'-O-methyl adenosine
  modified_base 70: mod_base = OTHER; note = 2'-O-methyl cytidine
  modified_base 71: mod_base = OTHER; note = 2'-O-methyl uridine
  modified_base 72: mod_base = OTHER; note = 2'-O-methyl uridine
  modified_base 73: mod_base = OTHER; note = 2'-O-methyl guanosine
  modified_base 74: mod_base = OTHER; note = 2'-O-methyl adenosine
  modified_base 75: mod_base = OTHER; note = 2'-O-methyl adenosine
  modified_base 76: mod_base = OTHER; note = 2'-O-methyl adenosine
  modified_base 77: mod_base = OTHER; note = 2'-O-methyl adenosine
  modified_base 78: mod_base = OTHER; note = 2'-O-methyl adenosine
  modified_base 79: mod_base = OTHER; note = 2'-O-methyl guanosine
  modified_base 80: mod_base = OTHER; note = 2'-O-methyl uridine
  modified_base 81: mod_base = OTHER; note = 2'-O-methyl guanosine
  modified_base 82: mod_base = OTHER; note = 2'-O-methyl guanosine
  modified_base 83: mod_base = OTHER; note = 2'-O-methyl cytidine
  modified_base 84: mod_base = OTHER; note = 2'-O-methyl adenosine
  modified_base 85: mod_base = OTHER; note = 2'-O-methyl cytidine
  modified_base 86: mod_base = OTHER; note = 2'-O-methyl cytidine
  modified_base 87: mod_base = OTHER; note = 2'-O-methyl guanosine
  modified_base 88: mod_base = OTHER; note = 2'-O-methyl adenosine
  modified_base 89: mod_base = OTHER; note = 2'-O-methyl guanosine
  modified_base 90: mod_base = OTHER; note = 2'-O-methyl uridine
  modified_base 91: mod_base = OTHER; note = 2'-O-methyl cytidine
  modified_base 92: mod_base = OTHER; note = 2'-O-methyl guanosine
  modified_base 93: mod_base = OTHER; note = 2'-O-methyl guanosine
  modified_base 94: mod_base = OTHER; note = 2'-O-methyl uridine
  modified_base 95: mod_base = OTHER; note = 2'-O-methyl guanosine
  modified_base 96: mod_base = OTHER; note = 2'-O-methyl cytidine
  modified_base 121: mod_base = OTHER; note = guanosine phosphorothioate
  modified_base 122: mod_base = OTHER; note = 2'-O-methyl uridine phosphorothioate
  modified_base 123: mod_base = OTHER; note = 2'-O-methyl guanosine phosphorothioate
  modified_base 124: mod_base = OTHER; note = 2'-O-methyl cytidine
catggtgcacctgactcctggttttagagctagaaatagcaagttaaaataaggctagtccgttatcaacttgaaaaagtggcaccgagtcggtgcggcagatttttctgccggagtcaggtgc

SEQ ID NO: 20871 - RNA, 124 nt, synthetic construct
  source 1..124: mol_type = other RNA
  modified_base 1: mod_base = OTHER; note = 2'-O-methyl cytidine phosphorothioate
  modified_base 2: mod_base = OTHER; note = 2'-O-methyl adenosine phosphorothioate
  modified_base 3: mod_base = OTHER; note = 2'-O-methyl uridine phosphorothioate
  modified_base 29: mod_base = OTHER; note = 2'-O-methyl guanosine
  modified_base 30: mod_base = OTHER; note = 2'-O-methyl cytidine
  modified_base 31: mod_base = OTHER; note = 2'-O-methyl uridine
  modified_base 32: mod_base = OTHER; note = 2'-O-methyl adenosine
  modified_base 33: mod_base = OTHER; note = 2'-O-methyl guanosine
  modified_base 34: mod_base = OTHER; note = 2'-O-methyl adenosine
  modified_base 35: mod_base = OTHER; note = 2'-O-methyl adenosine
  modified_base 36: mod_base = OTHER; note = 2'-O-methyl adenosine
  modified_base 37: mod_base = OTHER; note = 2'-O-methyl uridine
  modified_base 38: mod_base = OTHER; note = 2'-O-methyl adenosine
  modified_base 39: mod_base = OTHER; note = 2'-O-methyl guanosine
  modified_base 40: mod_base = OTHER; note = 2'-O-methyl cytidine
  modified_base 69: mod_base = OTHER; note = 2'-O-methyl adenosine
  modified_base 70: mod_base = OTHER; note = 2'-O-methyl cytidine
  modified_base 71: mod_base = OTHER; note = 2'-O-methyl uridine
  modified_base 72: mod_base = OTHER; note = 2'-O-methyl uridine
  modified_base 73: mod_base = OTHER; note = 2'-O-methyl guanosine
  modified_base 74: mod_base = OTHER; note = 2'-O-methyl adenosine
  modified_base 75: mod_base = OTHER; note = 2'-O-methyl adenosine
  modified_base 76: mod_base = OTHER; note = 2'-O-methyl adenosine
  modified_base 77: mod_base = OTHER; note = 2'-O-methyl adenosine
  modified_base 78: mod_base = OTHER; note = 2'-O-methyl adenosine
  modified_base 79: mod_base = OTHER; note = 2'-O-methyl guanosine
  modified_base 80: mod_base = OTHER; note = 2'-O-methyl uridine
  modified_base 81: mod_base = OTHER; note = 2'-O-methyl guanosine
  modified_base 82: mod_base = OTHER; note = 2'-O-methyl guanosine
  modified_base 83: mod_base = OTHER; note = 2'-O-methyl cytidine
  modified_base 84: mod_base = OTHER; note = 2'-O-methyl adenosine
  modified_base 85: mod_base = OTHER; note = 2'-O-methyl cytidine
  modified_base 86: mod_base = OTHER; note = 2'-O-methyl cytidine
  modified_base 87: mod_base = OTHER; note = 2'-O-methyl guanosine
  modified_base 88: mod_base = OTHER; note = 2'-O-methyl adenosine
  modified_base 89: mod_base = OTHER; note = 2'-O-methyl guanosine
  modified_base 90: mod_base = OTHER; note = 2'-O-methyl uridine
  modified_base 91: mod_base = OTHER; note = 2'-O-methyl cytidine
  modified_base 92: mod_base = OTHER; note = 2'-O-methyl guanosine
  modified_base 93: mod_base = OTHER; note = 2'-O-methyl guanosine
  modified_base 94: mod_base = OTHER; note = 2'-O-methyl uridine
  modified_base 95: mod_base = OTHER; note = 2'-O-methyl guanosine
  modified_base 96: mod_base = OTHER; note = 2'-O-methyl cytidine
  modified_base 121: mod_base = OTHER; note = guanosine phosphorothioate
  modified_base 122: mod_base = OTHER; note = 2'-O-methyl uridine phosphorothioate
  modified_base 123: mod_base = OTHER; note = 2'-O-methyl guanosine phosphorothioate
  modified_base 124: mod_base = OTHER; note = 2'-O-methyl cytidine
catggtgcacctgactcctggttttagagctagaaatagcaagttaaaataaggctagtccgttatcaacttgaaaaagtggcaccgagtcggtgcggcagatttttctgcgggagtcaggtgc

SEQ ID NO: 20872 - RNA, 124 nt, synthetic construct
  source 1..124: mol_type = other RNA
  modified_base 1: mod_base = OTHER; note = 2'-O-methyl cytidine phosphorothioate
  modified_base 2: mod_base = OTHER; note = 2'-O-methyl adenosine phosphorothioate
  modified_base 3: mod_base = OTHER; note = 2'-O-methyl uridine phosphorothioate
  modified_base 29: mod_base = OTHER; note = 2'-O-methyl guanosine
  modified_base 30: mod_base = OTHER; note = 2'-O-methyl cytidine
  modified_base 31: mod_base = OTHER; note = 2'-O-methyl uridine
  modified_base 32: mod_base = OTHER; note = 2'-O-methyl adenosine
  modified_base 33: mod_base = OTHER; note = 2'-O-methyl guanosine
  modified_base 34: mod_base = OTHER; note = 2'-O-methyl adenosine
  modified_base 35: mod_base = OTHER; note = 2'-O-methyl adenosine
  modified_base 36: mod_base = OTHER; note = 2'-O-methyl adenosine
  modified_base 37: mod_base = OTHER; note = 2'-O-methyl uridine
  modified_base 38: mod_base = OTHER; note = 2'-O-methyl adenosine
  modified_base 39: mod_base = OTHER; note = 2'-O-methyl guanosine
  modified_base 40: mod_base = OTHER; note = 2'-O-methyl cytidine
  modified_base 69: mod_base = OTHER; note = 2'-O-methyl adenosine
  modified_base 70: mod_base = OTHER; note = 2'-O-methyl cytidine
  modified_base 71: mod_base = OTHER; note = 2'-O-methyl uridine
  modified_base 72: mod_base = OTHER; note = 2'-O-methyl uridine
  modified_base 73: mod_base = OTHER; note = 2'-O-methyl guanosine
  modified_base 74: mod_base = OTHER; note = 2'-O-methyl adenosine
  modified_base 75: mod_base = OTHER; note = 2'-O-methyl adenosine
  modified_base 76: mod_base = OTHER; note = 2'-O-methyl adenosine
  modified_base 77: mod_base = OTHER; note = 2'-O-methyl adenosine
  modified_base 78: mod_base = OTHER; note = 2'-O-methyl adenosine
  modified_base 79: mod_base = OTHER; note = 2'-O-methyl guanosine
  modified_base 80: mod_base = OTHER; note = 2'-O-methyl uridine
  modified_base 81: mod_base = OTHER; note = 2'-O-methyl guanosine
  modified_base 82: mod_base = OTHER; note = 2'-O-methyl guanosine
  modified_base 83: mod_base = OTHER; note = 2'-O-methyl cytidine
  modified_base 84: mod_base = OTHER; note = 2'-O-methyl adenosine
  modified_base 85: mod_base = OTHER; note = 2'-O-methyl cytidine
  modified_base 86: mod_base = OTHER; note = 2'-O-methyl cytidine
  modified_base 87: mod_base = OTHER; note = 2'-O-methyl guanosine
  modified_base 88: mod_base = OTHER; note = 2'-O-methyl adenosine
  modified_base 89: mod_base = OTHER; note = 2'-O-methyl guanosine
  modified_base 90: mod_base = OTHER; note = 2'-O-methyl uridine
  modified_base 91: mod_base = OTHER; note = 2'-O-methyl cytidine
  modified_base 92: mod_base = OTHER; note = 2'-O-methyl guanosine
  modified_base 93: mod_base = OTHER; note = 2'-O-methyl guanosine
  modified_base 94: mod_base = OTHER; note = 2'-O-methyl uridine
  modified_base 95: mod_base = OTHER; note = 2'-O-methyl guanosine
  modified_base 96: mod_base = OTHER; note = 2'-O-methyl cytidine
  modified_base 121: mod_base = OTHER; note = guanosine phosphorothioate
  modified_base 122: mod_base = OTHER; note = 2'-O-methyl uridine phosphorothioate
  modified_base 123: mod_base = OTHER; note = 2'-O-methyl guanosine phosphorothioate
  modified_base 124: mod_base = OTHER; note = 2'-O-methyl cytidine
catggtgcacctgactcctggttttagagctagaaatagcaagttaaaataaggctagtccgttatcaacttgaaaaagtggcaccgagtcggtgcggcagatttttctgctggagtcaggtgc

SEQ ID NO: 20873 - RNA, 126 nt, synthetic construct
  source 1..126: mol_type = other RNA
  modified_base 1: mod_base = OTHER; note = 2'-O-methyl cytidine phosphorothioate
  modified_base 2: mod_base = OTHER; note = 2'-O-methyl adenosine phosphorothioate
  modified_base 3: mod_base = OTHER; note = 2'-O-methyl uridine phosphorothioate
  modified_base 29: mod_base = OTHER; note = 2'-O-methyl guanosine
  modified_base 30: mod_base = OTHER; note = 2'-O-methyl cytidine
  modified_base 31: mod_base = OTHER; note = 2'-O-methyl uridine
  modified_base 32: mod_base = OTHER; note = 2'-O-methyl adenosine
  modified_base 33: mod_base = OTHER; note = 2'-O-methyl guanosine
  modified_base 34: mod_base = OTHER; note = 2'-O-methyl adenosine
  modified_base 35: mod_base = OTHER; note = 2'-O-methyl adenosine
  modified_base 36: mod_base = OTHER; note = 2'-O-methyl adenosine
  modified_base 37: mod_base = OTHER; note = 2'-O-methyl uridine
  modified_base 38: mod_base = OTHER; note = 2'-O-methyl adenosine
  modified_base 39: mod_base = OTHER; note = 2'-O-methyl guanosine
  modified_base 40: mod_base = OTHER; note = 2'-O-methyl cytidine
  modified_base 69: mod_base = OTHER; note = 2'-O-methyl adenosine
  modified_base 70: mod_base = OTHER; note = 2'-O-methyl cytidine
  modified_base 71: mod_base = OTHER; note = 2'-O-methyl uridine
  modified_base 72: mod_base = OTHER; note = 2'-O-methyl uridine
  modified_base 73: mod_base = OTHER; note = 2'-O-methyl guanosine
  modified_base 74: mod_base = OTHER; note = 2'-O-methyl adenosine
  modified_base 75: mod_base = OTHER; note = 2'-O-methyl adenosine
  modified_base 76: mod_base = OTHER; note = 2'-O-methyl adenosine
  modified_base 77: mod_base = OTHER; note = 2'-O-methyl adenosine
  modified_base 78: mod_base = OTHER; note = 2'-O-methyl adenosine
  modified_base 79: mod_base = OTHER; note = 2'-O-methyl guanosine
  modified_base 80: mod_base = OTHER; note = 2'-O-methyl uridine
  modified_base 81: mod_base = OTHER; note = 2'-O-methyl guanosine
  modified_base 82: mod_base = OTHER; note = 2'-O-methyl guanosine
  modified_base 83: mod_base = OTHER; note = 2'-O-methyl cytidine
  modified_base 84: mod_base = OTHER; note = 2'-O-methyl adenosine
  modified_base 85: mod_base = OTHER; note = 2'-O-methyl cytidine
  modified_base 86: mod_base = OTHER; note = 2'-O-methyl cytidine
  modified_base 87: mod_base = OTHER; note = 2'-O-methyl guanosine
  modified_base 88: mod_base = OTHER; note = 2'-O-methyl adenosine
  modified_base 89: mod_base = OTHER; note = 2'-O-methyl guanosine
  modified_base 90: mod_base = OTHER; note = 2'-O-methyl uridine
  modified_base 91: mod_base = OTHER; note = 2'-O-methyl cytidine
  modified_base 92: mod_base = OTHER; note = 2'-O-methyl guanosine
  modified_base 93: mod_base = OTHER; note = 2'-O-methyl guanosine
  modified_base 94: mod_base = OTHER; note = 2'-O-methyl uridine
  modified_base 95: mod_base = OTHER; note = 2'-O-methyl guanosine
  modified_base 96: mod_base = OTHER; note = 2'-O-methyl cytidine
  modified_base 123: mod_base = OTHER; note = guanosine phosphorothioate
  modified_base 124: mod_base = OTHER; note = 2'-O-methyl uridine phosphorothioate
  modified_base 125: mod_base = OTHER; note = 2'-O-methyl guanosine phosphorothioate
  modified_base 126: mod_base = OTHER; note = 2'-O-methyl cytidine
catggtgcacctgactcctggttttagagctagaaatagcaagttaaaataaggctagtccgttatcaacttgaaaaagtggcaccgagtcggtgcacggcagacttctctgcaggagtcaggtgc

SEQ ID NO: 20874 - RNA, 126 nt, synthetic construct
  source 1..126: mol_type = other RNA
  modified_base 1: mod_base = OTHER; note = 2'-O-methyl cytidine phosphorothioate
  modified_base 2: mod_base = OTHER; note = 2'-O-methyl adenosine phosphorothioate
  modified_base 3: mod_base = OTHER; note = 2'-O-methyl uridine phosphorothioate
  modified_base 29: mod_base = OTHER; note = 2'-O-methyl guanosine
  modified_base 30: mod_base = OTHER; note = 2'-O-methyl cytidine
  modified_base 31: mod_base = OTHER; note = 2'-O-methyl uridine
  modified_base 32: mod_base = OTHER; note = 2'-O-methyl adenosine
  modified_base 33: mod_base = OTHER; note = 2'-O-methyl guanosine
  modified_base 34: mod_base = OTHER; note = 2'-O-methyl adenosine
  modified_base 35: mod_base = OTHER; note = 2'-O-methyl adenosine
  modified_base 36: mod_base = OTHER; note = 2'-O-methyl adenosine
  modified_base 37: mod_base = OTHER; note = 2'-O-methyl uridine
  modified_base 38: mod_base = OTHER; note = 2'-O-methyl adenosine
  modified_base 39: mod_base = OTHER; note = 2'-O-methyl guanosine
  modified_base 40: mod_base = OTHER; note = 2'-O-methyl cytidine
  modified_base 69: mod_base = OTHER; note = 2'-O-methyl adenosine
  modified_base 70: mod_base = OTHER; note = 2'-O-methyl cytidine
  modified_base 71: mod_base = OTHER; note = 2'-O-methyl uridine
  modified_base 72: mod_base = OTHER; note = 2'-O-methyl uridine
  modified_base 73: mod_base = OTHER; note = 2'-O-methyl guanosine
  modified_base 74: mod_base = OTHER; note = 2'-O-methyl adenosine
  modified_base 75: mod_base = OTHER; note = 2'-O-methyl adenosine
  modified_base 76: mod_base = OTHER; note = 2'-O-methyl adenosine
  modified_base 77: mod_base = OTHER; note = 2'-O-methyl adenosine
  modified_base 78: mod_base = OTHER; note = 2'-O-methyl adenosine
  modified_base 79: mod_base = OTHER; note = 2'-O-methyl guanosine
  modified_base 80: mod_base = OTHER; note = 2'-O-methyl uridine
  modified_base 81: mod_base = OTHER; note = 2'-O-methyl guanosine
  modified_base 82: mod_base = OTHER; note = 2'-O-methyl guanosine
  modified_base 83: mod_base = OTHER; note = 2'-O-methyl cytidine
  modified_base 84: mod_base = OTHER; note = 2'-O-methyl adenosine
  modified_base 85: mod_base = OTHER; note = 2'-O-methyl cytidine
  modified_base 86: mod_base = OTHER; note = 2'-O-methyl cytidine
  modified_base 87: mod_base = OTHER; note = 2'-O-methyl guanosine
  modified_base 88: mod_base = OTHER; note = 2'-O-methyl adenosine
  modified_base 89: mod_base = OTHER; note = 2'-O-methyl guanosine
  modified_base 90: mod_base = OTHER; note = 2'-O-methyl uridine
  modified_base 91: mod_base = OTHER; note = 2'-O-methyl cytidine
  modified_base 92: mod_base = OTHER; note = 2'-O-methyl guanosine
  modified_base 93: mod_base = OTHER; note = 2'-O-methyl guanosine
  modified_base 94: mod_base = OTHER; note = 2'-O-methyl uridine
  modified_base 95: mod_base = OTHER; note = 2'-O-methyl guanosine
  modified_base 96: mod_base = OTHER; note = 2'-O-methyl cytidine
  modified_base 123: mod_base = OTHER; note = guanosine phosphorothioate
  modified_base 124: mod_base = OTHER; note = 2'-O-methyl uridine phosphorothioate
  modified_base 125: mod_base = OTHER; note = 2'-O-methyl guanosine phosphorothioate
  modified_base 126: mod_base = OTHER; note = 2'-O-methyl cytidine
catggtgcacctgactcctggttttagagctagaaatagcaagttaaaataaggctagtccgttatcaacttgaaaaagtggcaccgagtcggtgcacggcagacttctctgccggagtcaggtgc

SEQ ID NO: 20875 - RNA, 126 nt, synthetic construct
  source 1..126: mol_type = other RNA
  modified_base 1: mod_base = OTHER; note = 2'-O-methyl cytidine phosphorothioate
  modified_base 2: mod_base = OTHER; note = 2'-O-methyl adenosine phosphorothioate
  modified_base 3: mod_base = OTHER; note = 2'-O-methyl uridine phosphorothioate
  modified_base 29: mod_base = OTHER; note = 2'-O-methyl guanosine
  modified_base 30: mod_base = OTHER; note = 2'-O-methyl cytidine
  modified_base 31: mod_base = OTHER; note = 2'-O-methyl uridine
  modified_base 32: mod_base = OTHER; note = 2'-O-methyl adenosine
  modified_base 33: mod_base = OTHER; note = 2'-O-methyl guanosine
  modified_base 34: mod_base = OTHER; note = 2'-O-methyl adenosine
  modified_base 35: mod_base = OTHER; note = 2'-O-methyl adenosine
  modified_base 36: mod_base = OTHER; note = 2'-O-methyl adenosine
  modified_base 37: mod_base = OTHER; note = 2'-O-methyl uridine
  modified_base 38: mod_base = OTHER; note = 2'-O-methyl adenosine
  modified_base 39: mod_base = OTHER; note = 2'-O-methyl guanosine
  modified_base 40: mod_base = OTHER; note = 2'-O-methyl cytidine
  modified_base 69: mod_base = OTHER; note = 2'-O-methyl adenosine
  modified_base 70: mod_base = OTHER; note = 2'-O-methyl cytidine
  modified_base 71: mod_base = OTHER; note = 2'-O-methyl uridine
  modified_base 72: mod_base = OTHER; note = 2'-O-methyl uridine
  modified_base 73: mod_base = OTHER; note = 2'-O-methyl guanosine
  modified_base 74: mod_base = OTHER; note = 2'-O-methyl adenosine
  modified_base 75: mod_base = OTHER; note = 2'-O-methyl adenosine
  modified_base 76: mod_base = OTHER; note = 2'-O-methyl adenosine
  modified_base 77: mod_base = OTHER; note = 2'-O-methyl adenosine
  modified_base 78: mod_base = OTHER; note = 2'-O-methyl adenosine
  modified_base 79: mod_base = OTHER; note = 2'-O-methyl guanosine
  modified_base 80: mod_base = OTHER; note = 2'-O-methyl uridine
  modified_base 81: mod_base = OTHER; note = 2'-O-methyl guanosine
  modified_base 82: mod_base = OTHER; note = 2'-O-methyl guanosine
  modified_base 83: mod_base = OTHER; note = 2'-O-methyl cytidine
  modified_base 84: mod_base = OTHER; note = 2'-O-methyl adenosine
  modified_base 85: mod_base = OTHER; note = 2'-O-methyl cytidine
  modified_base 86: mod_base = OTHER; note = 2'-O-methyl cytidine
  modified_base 87: mod_base = OTHER; note = 2'-O-methyl guanosine
  modified_base 88: mod_base = OTHER; note = 2'-O-methyl adenosine
  modified_base 89: mod_base = OTHER; note = 2'-O-methyl guanosine
  modified_base 90: mod_base = OTHER; note = 2'-O-methyl uridine
  modified_base 91: mod_base = OTHER; note = 2'-O-methyl cytidine
  modified_base 92: mod_base = OTHER; note = 2'-O-methyl guanosine
  modified_base 93: mod_base = OTHER; note = 2'-O-methyl guanosine
  modified_base 94: mod_base = OTHER; note = 2'-O-methyl uridine
  modified_base 95: mod_base = OTHER; note = 2'-O-methyl guanosine
  modified_base 96: mod_base = OTHER; note = 2'-O-methyl cytidine
  modified_base 123: mod_base = OTHER; note = guanosine phosphorothioate
  modified_base 124: mod_base = OTHER; note = 2'-O-methyl uridine phosphorothioate
  modified_base 125: mod_base = OTHER; note = 2'-O-methyl guanosine phosphorothioate
  modified_base 126: mod_base = OTHER; note = 2'-O-methyl cytidine
catggtgcacctgactcctggttttagagctagaaatagcaagttaaaataaggctagtccgttatcaacttgaaaaagtggcaccgagtcggtgcacggcagacttctctgcgggagtcaggtgc

SEQ ID NO: 20876 - RNA, 126 nt, synthetic construct
  source 1..126: mol_type = other RNA
  modified_base 1: mod_base = OTHER; note = 2'-O-methyl cytidine phosphorothioate
  modified_base 2: mod_base = OTHER; note = 2'-O-methyl adenosine phosphorothioate
  modified_base 3: mod_base = OTHER; note = 2'-O-methyl uridine phosphorothioate
  modified_base 29: mod_base = OTHER; note = 2'-O-methyl guanosine
  modified_base 30: mod_base = OTHER; note = 2'-O-methyl cytidine
  modified_base 31: mod_base = OTHER; note = 2'-O-methyl uridine
  modified_base 32: mod_base = OTHER; note = 2'-O-methyl adenosine
  modified_base 33: mod_base = OTHER; note = 2'-O-methyl guanosine
  modified_base 34: mod_base = OTHER; note = 2'-O-methyl adenosine
  modified_base 35: mod_base = OTHER; note = 2'-O-methyl adenosine
  modified_base 36: mod_base = OTHER; note = 2'-O-methyl adenosine
  modified_base 37: mod_base = OTHER; note = 2'-O-methyl uridine
  modified_base 38: mod_base = OTHER; note = 2'-O-methyl adenosine
  modified_base 39: mod_base = OTHER; note = 2'-O-methyl guanosine
  modified_base 40: mod_base = OTHER; note = 2'-O-methyl cytidine
  modified_base 69: mod_base = OTHER; note = 2'-O-methyl adenosine
  modified_base 70: mod_base = OTHER; note = 2'-O-methyl cytidine
  modified_base 71: mod_base = OTHER; note = 2'-O-methyl uridine
  modified_base 72: mod_base = OTHER; note = 2'-O-methyl uridine
  modified_base 73: mod_base = OTHER; note = 2'-O-methyl guanosine
  modified_base 74: mod_base = OTHER; note = 2'-O-methyl adenosine
  modified_base 75: mod_base = OTHER; note = 2'-O-methyl adenosine
  modified_base 76: mod_base = OTHER; note = 2'-O-methyl adenosine
  modified_base 77: mod_base = OTHER; note = 2'-O-methyl adenosine
  modified_base 78: mod_base = OTHER; note = 2'-O-methyl adenosine
  modified_base 79: mod_base = OTHER; note = 2'-O-methyl guanosine
  modified_base 80: mod_base = OTHER; note = 2'-O-methyl uridine
  modified_base 81: mod_base = OTHER; note = 2'-O-methyl guanosine
  modified_base 82: mod_base = OTHER; note = 2'-O-methyl guanosine
  modified_base 83: mod_base = OTHER; note = 2'-O-methyl cytidine
  modified_base 84: mod_base = OTHER; note = 2'-O-methyl adenosine
  modified_base 85: mod_base = OTHER; note = 2'-O-methyl cytidine
  modified_base 86: mod_base = OTHER; note = 2'-O-methyl cytidine
  modified_base 87: mod_base = OTHER; note = 2'-O-methyl guanosine
  modified_base 88: mod_base = OTHER; note = 2'-O-methyl adenosine
  modified_base 89: mod_base = OTHER; note = 2'-O-methyl guanosine
  modified_base 90: mod_base = OTHER; note = 2'-O-methyl uridine
  modified_base 91: mod_base = OTHER; note = 2'-O-methyl cytidine
  modified_base 92: mod_base = OTHER; note = 2'-O-methyl guanosine
  modified_base 93: mod_base = OTHER; note = 2'-O-methyl guanosine
  modified_base 94: mod_base = OTHER; note = 2'-O-methyl uridine
  modified_base 95: mod_base = OTHER; note = 2'-O-methyl guanosine
  modified_base 96: mod_base = OTHER; note = 2'-O-methyl cytidine
  modified_base 123: mod_base = OTHER; note = guanosine phosphorothioate
  modified_base 124: mod_base = OTHER; note = 2'-O-methyl uridine phosphorothioate
  modified_base 125: mod_base = OTHER; note = 2'-O-methyl guanosine phosphorothioate
  modified_base 126: mod_base = OTHER; note = 2'-O-methyl cytidine
catggtgcacctgactcctggttttagagctagaaatagcaagttaaaataaggctagtccgttatcaacttgaaaaagtggcaccgagtcggtgcacggcagacttctctgctggagtcaggtgc

SEQ ID NO: 20877 - RNA, 126 nt, synthetic construct
  source 1..126: mol_type = other RNA
  modified_base 1: mod_base = OTHER; note = 2'-O-methyl cytidine phosphorothioate
  modified_base 2: mod_base = OTHER; note = 2'-O-methyl adenosine phosphorothioate
  modified_base 3: mod_base = OTHER; note = 2'-O-methyl uridine phosphorothioate
  modified_base 29: mod_base = OTHER; note = 2'-O-methyl guanosine
  modified_base 30: mod_base = OTHER; note = 2'-O-methyl cytidine
  modified_base 31: mod_base = OTHER; note = 2'-O-methyl uridine
  modified_base 32: mod_base = OTHER; note = 2'-O-methyl adenosine
  modified_base 33: mod_base = OTHER; note = 2'-O-methyl guanosine
  modified_base 34: mod_base = OTHER; note = 2'-O-methyl adenosine
  modified_base 35: mod_base = OTHER; note = 2'-O-methyl adenosine
  modified_base 36: mod_base = OTHER; note = 2'-O-methyl adenosine
  modified_base 37: mod_base = OTHER; note = 2'-O-methyl uridine
  modified_base 38: mod_base = OTHER; note = 2'-O-methyl adenosine
  modified_base 39: mod_base = OTHER; note = 2'-O-methyl guanosine
  modified_base 40: mod_base = OTHER; note = 2'-O-methyl cytidine
  modified_base 69: mod_base = OTHER; note = 2'-O-methyl adenosine
  modified_base 70: mod_base = OTHER; note = 2'-O-methyl cytidine
  modified_base 71: mod_base = OTHER; note = 2'-O-methyl uridine
  modified_base 72: mod_base = OTHER; note = 2'-O-methyl uridine
  modified_base 73: mod_base = OTHER; note = 2'-O-methyl guanosine
  modified_base 74: mod_base = OTHER; note = 2'-O-methyl adenosine
  modified_base 75: mod_base = OTHER; note = 2'-O-methyl adenosine
  modified_base 76: mod_base = OTHER; note = 2'-O-methyl adenosine
  modified_base 77: mod_base = OTHER; note = 2'-O-methyl adenosine
  modified_base 78: mod_base = OTHER; note = 2'-O-methyl adenosine
  modified_base 79: mod_base = OTHER; note = 2'-O-methyl guanosine
  modified_base 80: mod_base = OTHER; note = 2'-O-methyl uridine
  modified_base 81: mod_base = OTHER; note = 2'-O-methyl guanosine
  modified_base 82: mod_base = OTHER; note = 2'-O-methyl guanosine
  modified_base 83: mod_base = OTHER; note = 2'-O-methyl cytidine
  modified_base 84: mod_base = OTHER; note = 2'-O-methyl adenosine
  modified_base 85: mod_base = OTHER; note = 2'-O-methyl cytidine
  modified_base 86: mod_base = OTHER; note = 2'-O-methyl cytidine
  modified_base 87: mod_base = OTHER; note = 2'-O-methyl guanosine
  modified_base 88: mod_base = OTHER; note = 2'-O-methyl adenosine
  modified_base 89: mod_base = OTHER; note = 2'-O-methyl guanosine
  modified_base 90: mod_base = OTHER; note = 2'-O-methyl uridine
  modified_base 91: mod_base = OTHER; note = 2'-O-methyl cytidine
  modified_base 92: mod_base = OTHER; note = 2'-O-methyl guanosine
  modified_base 93: mod_base = OTHER; note = 2'-O-methyl guanosine
  modified_base 94: mod_base = OTHER; note = 2'-O-methyl uridine
  modified_base 95: mod_base = OTHER; note = 2'-O-methyl guanosine
  modified_base 96: mod_base = OTHER; note = 2'-O-methyl cytidine
  modified_base 123: mod_base = OTHER; note = guanosine phosphorothioate
  modified_base 124: mod_base = OTHER; note = 2'-O-methyl uridine phosphorothioate
  modified_base 125: mod_base = OTHER; note = 2'-O-methyl guanosine phosphorothioate
  modified_base 126: mod_base = OTHER; note = 2'-O-methyl cytidine
catggtgcacctgactcctggttttagagctagaaatagcaagttaaaataaggctagtccgttatcaacttgaaaaagtggcaccgagtcggtgcacggcagatttctctgcaggagtcaggtgc

SEQ ID NO: 20878 - RNA, 126 nt, synthetic construct
  source 1..126: mol_type = other RNA
  modified_base 1: mod_base = OTHER; note = 2'-O-methyl cytidine phosphorothioate
  modified_base 2: mod_base = OTHER; note = 2'-O-methyl adenosine phosphorothioate
  modified_base 3: mod_base = OTHER; note = 2'-O-methyl uridine phosphorothioate
  modified_base 29: mod_base = OTHER; note = 2'-O-methyl guanosine
  modified_base 30: mod_base = OTHER; note = 2'-O-methyl cytidine
  modified_base 31: mod_base = OTHER; note = 2'-O-methyl uridine
  modified_base 32: mod_base = OTHER; note = 2'-O-methyl adenosine
  modified_base 33: mod_base = OTHER; note = 2'-O-methyl guanosine
  modified_base 34: mod_base = OTHER; note = 2'-O-methyl adenosine
  modified_base 35: mod_base = OTHER; note = 2'-O-methyl adenosine
  modified_base 36: mod_base = OTHER; note = 2'-O-methyl adenosine
  modified_base 37: mod_base = OTHER; note = 2'-O-methyl uridine
  modified_base 38: mod_base = OTHER; note = 2'-O-methyl adenosine
  modified_base 39: mod_base = OTHER; note = 2'-O-methyl guanosine
  modified_base 40: mod_base = OTHER; note = 2'-O-methyl cytidine
  modified_base 69: mod_base = OTHER; note = 2'-O-methyl adenosine
  modified_base 70: mod_base = OTHER; note = 2'-O-methyl cytidine
  modified_base 71: mod_base = OTHER; note = 2'-O-methyl uridine
  modified_base 72: mod_base = OTHER; note = 2'-O-methyl uridine
  modified_base 73: mod_base = OTHER; note = 2'-O-methyl guanosine
  modified_base 74: mod_base = OTHER; note = 2'-O-methyl adenosine
  modified_base 75: mod_base = OTHER; note = 2'-O-methyl adenosine
  modified_base 76: mod_base = OTHER; note = 2'-O-methyl adenosine
  modified_base 77: mod_base = OTHER; note = 2'-O-methyl adenosine
  modified_base 78: mod_base = OTHER; note = 2'-O-methyl adenosine
  modified_base 79: mod_base = OTHER; note = 2'-O-methyl guanosine
  modified_base 80: mod_base = OTHER; note = 2'-O-methyl uridine
  modified_base 81: mod_base = OTHER; note = 2'-O-methyl guanosine
  modified_base 82: mod_base = OTHER; note = 2'-O-methyl guanosine
  modified_base 83: mod_base = OTHER; note = 2'-O-methyl cytidine
  modified_base 84: mod_base = OTHER; note = 2'-O-methyl adenosine
  modified_base 85: mod_base = OTHER; note = 2'-O-methyl cytidine
  modified_base 86: mod_base = OTHER; note = 2'-O-methyl cytidine
  modified_base 87: mod_base = OTHER; note = 2'-O-methyl guanosine
  modified_base 88: mod_base = OTHER; note = 2'-O-methyl adenosine
  modified_base 89: mod_base = OTHER; note = 2'-O-methyl guanosine
  modified_base 90: mod_base = OTHER; note = 2'-O-methyl uridine
  modified_base 91: mod_base = OTHER; note = 2'-O-methyl cytidine
  modified_base 92: mod_base = OTHER; note = 2'-O-methyl guanosine
  modified_base 93: mod_base = OTHER; note = 2'-O-methyl guanosine
  modified_base 94: mod_base = OTHER; note = 2'-O-methyl uridine
  modified_base 95: mod_base = OTHER; note = 2'-O-methyl guanosine
  modified_base 96: mod_base = OTHER; note = 2'-O-methyl cytidine
  modified_base 123: mod_base = OTHER; note = guanosine phosphorothioate
  modified_base 124: mod_base = OTHER; note = 2'-O-methyl uridine phosphorothioate
  modified_base 125: mod_base = OTHER; note = 2'-O-methyl guanosine phosphorothioate
  modified_base 126: mod_base = OTHER; note = 2'-O-methyl cytidine
catggtgcacctgactcctggttttagagctagaaatagcaagttaaaataaggctagtccgttatcaacttgaaaaagtggcaccgagtcggtgcacggcagacttttctgcaggagtcaggtgc

SEQ ID NO: 20879 - RNA, 126 nt, synthetic construct
  source 1..126: mol_type = other RNA
  modified_base 1: mod_base = OTHER; note = 2'-O-methyl cytidine phosphorothioate
  modified_base 2: mod_base = OTHER; note = 2'-O-methyl adenosine phosphorothioate
  modified_base 3: mod_base = OTHER; note = 2'-O-methyl uridine phosphorothioate
  modified_base 29: mod_base = OTHER; note = 2'-O-methyl guanosine
  modified_base 30: mod_base = OTHER; note = 2'-O-methyl cytidine
  modified_base 31: mod_base = OTHER; note = 2'-O-methyl uridine
  modified_base 32: mod_base = OTHER; note = 2'-O-methyl adenosine
  modified_base 33: mod_base = OTHER; note = 2'-O-methyl guanosine
  modified_base 34: mod_base = OTHER; note = 2'-O-methyl adenosine
  modified_base 35: mod_base = OTHER; note = 2'-O-methyl adenosine
  modified_base 36: mod_base = OTHER; note = 2'-O-methyl adenosine
  modified_base 37: mod_base = OTHER; note = 2'-O-methyl uridine
  modified_base 38: mod_base = OTHER; note = 2'-O-methyl adenosine
  modified_base 39: mod_base = OTHER; note = 2'-O-methyl guanosine
  modified_base 40: mod_base = OTHER; note = 2'-O-methyl cytidine
  modified_base 69: mod_base = OTHER; note = 2'-O-methyl adenosine
  modified_base 70: mod_base = OTHER; note = 2'-O-methyl cytidine
  modified_base 71: mod_base = OTHER; note = 2'-O-methyl uridine
  modified_base 72: mod_base = OTHER; note = 2'-O-methyl uridine
  modified_base 73: mod_base = OTHER; note = 2'-O-methyl guanosine
  modified_base 74: mod_base = OTHER; note = 2'-O-methyl adenosine
  modified_base 75: mod_base = OTHER; note = 2'-O-methyl adenosine
  modified_base 76: mod_base = OTHER; note = 2'-O-methyl adenosine
  modified_base 77: mod_base = OTHER; note = 2'-O-methyl adenosine
  modified_base 78: mod_base = OTHER; note = 2'-O-methyl adenosine
  modified_base 79: mod_base = OTHER; note = 2'-O-methyl guanosine
  modified_base 80: mod_base = OTHER; note = 2'-O-methyl uridine
  modified_base 81: mod_base = OTHER; note = 2'-O-methyl guanosine
  modified_base 82: mod_base = OTHER; note = 2'-O-methyl guanosine
  modified_base 83: mod_base = OTHER; note = 2'-O-methyl cytidine
  modified_base 84: mod_base = OTHER; note = 2'-O-methyl adenosine
  modified_base 85: mod_base = OTHER; note = 2'-O-methyl cytidine
  modified_base 86: mod_base = OTHER; note = 2'-O-methyl cytidine
  modified_base 87: mod_base = OTHER; note = 2'-O-methyl guanosine
  modified_base 88: mod_base = OTHER; note = 2'-O-methyl adenosine
  modified_base 89: mod_base = OTHER; note = 2'-O-methyl guanosine
  modified_base 90: mod_base = OTHER; note = 2'-O-methyl uridine
  modified_base 91: mod_base = OTHER; note = 2'-O-methyl cytidine
  modified_base 92: mod_base = OTHER; note = 2'-O-methyl guanosine
  modified_base 93: mod_base = OTHER; note = 2'-O-methyl guanosine
  modified_base 94: mod_base = OTHER; note = 2'-O-methyl uridine
  modified_base 95: mod_base = OTHER; note = 2'-O-methyl guanosine
  modified_base 96: mod_base = OTHER; note = 2'-O-methyl cytidine
  modified_base 123: mod_base = OTHER; note = guanosine phosphorothioate
  modified_base 124: mod_base = OTHER; note = 2'-O-methyl uridine phosphorothioate
  modified_base 125: mod_base = OTHER; note = 2'-O-methyl guanosine phosphorothioate
  modified_base 126: mod_base = OTHER; note = 2'-O-methyl cytidine
catggtgcacctgactcctggttttagagctagaaatagcaagttaaaataaggctagtccgttatcaacttgaaaaagtggcaccgagtcggtgcacggcagacttttctgccggagtcaggtgc

SEQ ID NO: 20880 - RNA, 126 nt, synthetic construct
  source 1..126: mol_type = other RNA
  modified_base 1: mod_base = OTHER; note = 2'-O-methyl cytidine phosphorothioate
  modified_base 2: mod_base = OTHER; note = 2'-O-methyl adenosine phosphorothioate
  modified_base 3: mod_base = OTHER; note = 2'-O-methyl uridine phosphorothioate
  modified_base 29: mod_base = OTHER; note = 2'-O-methyl guanosine
  modified_base 30: mod_base = OTHER; note = 2'-O-methyl cytidine
  modified_base 31: mod_base = OTHER; note = 2'-O-methyl uridine
  modified_base 32: mod_base = OTHER; note = 2'-O-methyl adenosine
  modified_base 33: mod_base = OTHER; note = 2'-O-methyl guanosine
  modified_base 34: mod_base = OTHER; note = 2'-O-methyl adenosine
  modified_base 35: mod_base = OTHER; note = 2'-O-methyl adenosine
  modified_base 36: mod_base = OTHER; note = 2'-O-methyl adenosine
  modified_base 37: mod_base = OTHER; note = 2'-O-methyl uridine
  modified_base 38: mod_base = OTHER; note = 2'-O-methyl adenosine
  modified_base 39: mod_base = OTHER; note = 2'-O-methyl guanosine
  modified_base 40: mod_base = OTHER; note = 2'-O-methyl cytidine
  modified_base 69: mod_base = OTHER; note = 2'-O-methyl adenosine
  modified_base 70: mod_base = OTHER; note = 2'-O-methyl cytidine
  modified_base 71: mod_base = OTHER; note = 2'-O-methyl uridine
  modified_base 72: mod_base = OTHER; note = 2'-O-methyl uridine
  modified_base 73: mod_base = OTHER; note = 2'-O-methyl guanosine
  modified_base 74: mod_base = OTHER; note = 2'-O-methyl adenosine
  modified_base 75: mod_base = OTHER; note = 2'-O-methyl adenosine
  modified_base 76: mod_base = OTHER; note = 2'-O-methyl adenosine
  modified_base 77: mod_base = OTHER; note = 2'-O-methyl adenosine
  modified_base 78: mod_base = OTHER; note = 2'-O-methyl adenosine
  modified_base 79: mod_base = OTHER; note = 2'-O-methyl guanosine
  modified_base 80: mod_base = OTHER; note = 2'-O-methyl uridine
  modified_base 81: mod_base = OTHER; note = 2'-O-methyl guanosine
  modified_base 82: mod_base = OTHER; note = 2'-O-methyl guanosine
  modified_base 83: mod_base = OTHER; note = 2'-O-methyl cytidine
  modified_base 84: mod_base = OTHER; note = 2'-O-methyl adenosine
  modified_base 85: mod_base = OTHER; note = 2'-O-methyl cytidine
  modified_base 86: mod_base = OTHER; note = 2'-O-methyl cytidine
  modified_base 87: mod_base = OTHER; note = 2'-O-methyl guanosine
  modified_base 88: mod_base = OTHER; note = 2'-O-methyl adenosine
  modified_base 89: mod_base = OTHER; note = 2'-O-methyl guanosine
  modified_base 90: mod_base = OTHER; note = 2'-O-methyl uridine
  modified_base 91: mod_base = OTHER; note = 2'-O-methyl cytidine
  modified_base 92: mod_base = OTHER; note = 2'-O-methyl guanosine
  modified_base 93: mod_base = OTHER; note = 2'-O-methyl guanosine
  modified_base 94: mod_base = OTHER; note = 2'-O-methyl uridine
  modified_base 95: mod_base = OTHER; note = 2'-O-methyl guanosine
  modified_base 96: mod_base = OTHER; note = 2'-O-methyl cytidine
  modified_base 123: mod_base = OTHER; note = guanosine phosphorothioate
  modified_base 124: mod_base = OTHER; note = 2'-O-methyl uridine phosphorothioate
  modified_base 125: mod_base = OTHER; note = 2'-O-methyl guanosine phosphorothioate
  modified_base 126: mod_base = OTHER; note = 2'-O-methyl cytidine
catggtgcacctgactcctggttttagagctagaaatagcaagttaaaataaggctagtccgttatcaacttgaaaaagtggcaccgagtcggtgcacggcagacttttctgcgggagtcaggtgc

SEQ ID NO: 20881 - RNA, 126 nt, synthetic construct
  source 1..126: mol_type = other RNA
  modified_base 1: mod_base = OTHER; note = 2'-O-methyl cytidine phosphorothioate
  modified_base 2: mod_base = OTHER; note = 2'-O-methyl adenosine phosphorothioate
  modified_base 3: mod_base = OTHER; note = 2'-O-methyl uridine phosphorothioate
  modified_base 29: mod_base = OTHER; note = 2'-O-methyl guanosine
  modified_base 30: mod_base = OTHER; note = 2'-O-methyl cytidine
  modified_base 31: mod_base = OTHER; note = 2'-O-methyl uridine
  modified_base 32: mod_base = OTHER; note = 2'-O-methyl adenosine
  modified_base 33: mod_base = OTHER; note = 2'-O-methyl guanosine
  modified_base 34: mod_base = OTHER; note = 2'-O-methyl adenosine
  modified_base 35: mod_base = OTHER; note = 2'-O-methyl adenosine
  modified_base 36: mod_base = OTHER; note = 2'-O-methyl adenosine
  modified_base 37: mod_base = OTHER; note = 2'-O-methyl uridine
  modified_base 38: mod_base = OTHER; note = 2'-O-methyl adenosine
  modified_base 39: mod_base = OTHER; note = 2'-O-methyl guanosine
  modified_base 40: mod_base = OTHER; note = 2'-O-methyl cytidine
  modified_base 69: mod_base = OTHER; note = 2'-O-methyl adenosine
  modified_base 70: mod_base = OTHER; note = 2'-O-methyl cytidine
  modified_base 71: mod_base = OTHER; note = 2'-O-methyl uridine
  modified_base 72: mod_base = OTHER; note = 2'-O-methyl uridine
  modified_base 73: mod_base = OTHER; note = 2'-O-methyl guanosine
  modified_base 74: mod_base = OTHER; note = 2'-O-methyl adenosine
  modified_base 75: mod_base = OTHER; note = 2'-O-methyl adenosine
  modified_base 76: mod_base = OTHER; note = 2'-O-methyl adenosine
  modified_base 77: mod_base = OTHER; note = 2'-O-methyl adenosine
  modified_base 78: mod_base = OTHER; note = 2'-O-methyl adenosine
  modified_base 79: mod_base = OTHER; note = 2'-O-methyl guanosine
  modified_base 80: mod_base = OTHER; note = 2'-O-methyl uridine
  modified_base 81: mod_base = OTHER; note = 2'-O-methyl guanosine
  modified_base 82: mod_base = OTHER; note = 2'-O-methyl guanosine
  modified_base 83: mod_base = OTHER; note = 2'-O-methyl cytidine
  modified_base 84: mod_base = OTHER; note = 2'-O-methyl adenosine
  modified_base 85: mod_base = OTHER; note = 2'-O-methyl cytidine
  modified_base 86: mod_base = OTHER; note = 2'-O-methyl cytidine
  modified_base 87: mod_base = OTHER; note = 2'-O-methyl guanosine
  modified_base 88: mod_base = OTHER; note = 2'-O-methyl adenosine
  modified_base 89: mod_base = OTHER; note = 2'-O-methyl guanosine
  modified_base 90: mod_base = OTHER; note = 2'-O-methyl uridine
  modified_base 91: mod_base = OTHER; note = 2'-O-methyl cytidine
  modified_base 92: mod_base = OTHER; note = 2'-O-methyl guanosine
  modified_base 93: mod_base = OTHER; note = 2'-O-methyl guanosine
  modified_base 94: mod_base = OTHER; note = 2'-O-methyl uridine
  modified_base 95: mod_base = OTHER; note = 2'-O-methyl guanosine
  modified_base 96: mod_base = OTHER; note = 2'-O-methyl cytidine
  modified_base 123: mod_base = OTHER; note = guanosine phosphorothioate
  modified_base 124: mod_base = OTHER; note = 2'-O-methyl uridine phosphorothioate
  modified_base 125: mod_base = OTHER; note = 2'-O-methyl guanosine phosphorothioate
  modified_base 126: mod_base = OTHER; note = 2'-O-methyl cytidine
catggtgcacctgactcctggttttagagctagaaatagcaagttaaaataaggctagtccgttatcaacttgaaaaagtggcaccgagtcggtgcacggcagacttttctgctggagtcaggtgc

SEQ ID NO: 20882 - RNA, 126 nt, synthetic construct
  source 1..126: mol_type = other RNA
  modified_base 1: mod_base = OTHER; note = 2'-O-methyl cytidine phosphorothioate
  modified_base 2: mod_base = OTHER; note = 2'-O-methyl adenosine phosphorothioate
  modified_base 3: mod_base = OTHER; note = 2'-O-methyl uridine phosphorothioate
  modified_base 29: mod_base = OTHER; note = 2'-O-methyl guanosine
  modified_base 30: mod_base = OTHER; note = 2'-O-methyl cytidine
  modified_base 31: mod_base = OTHER; note = 2'-O-methyl uridine
  modified_base 32: mod_base = OTHER; note = 2'-O-methyl adenosine
  modified_base 33: mod_base = OTHER; note = 2'-O-methyl guanosine
  modified_base 34: mod_base = OTHER; note = 2'-O-methyl adenosine
  modified_base 35: mod_base = OTHER; note = 2'-O-methyl adenosine
  modified_base 36: mod_base = OTHER; note = 2'-O-methyl adenosine
  modified_base 37: mod_base = OTHER; note = 2'-O-methyl uridine
  modified_base 38: mod_base = OTHER; note = 2'-O-methyl adenosine
  modified_base 39: mod_base = OTHER; note = 2'-O-methyl guanosine
  modified_base 40: mod_base = OTHER; note = 2'-O-methyl cytidine
  modified_base 69: mod_base = OTHER; note = 2'-O-methyl adenosine
  modified_base 70: mod_base = OTHER; note = 2'-O-methyl cytidine
  modified_base 71: mod_base = OTHER; note = 2'-O-methyl uridine
  modified_base 72: mod_base = OTHER; note = 2'-O-methyl uridine
  modified_base 73: mod_base = OTHER; note = 2'-O-methyl guanosine
  modified_base 74: mod_base = OTHER; note = 2'-O-methyl adenosine
  modified_base 75: mod_base = OTHER; note = 2'-O-methyl adenosine
  modified_base 76: mod_base = OTHER; note = 2'-O-methyl adenosine
  modified_base 77: mod_base = OTHER; note = 2'-O-methyl adenosine
  modified_base 78: mod_base = OTHER; note = 2'-O-methyl adenosine
  modified_base 79: mod_base = OTHER; note = 2'-O-methyl guanosine
  modified_base 80: mod_base = OTHER; note = 2'-O-methyl uridine
  modified_base 81: mod_base = OTHER; note = 2'-O-methyl guanosine
  modified_base 82: mod_base = OTHER; note = 2'-O-methyl guanosine
  modified_base 83: mod_base = OTHER; note = 2'-O-methyl cytidine
  modified_base 84: mod_base = OTHER; note = 2'-O-methyl adenosine
  modified_base 85: mod_base = OTHER; note = 2'-O-methyl cytidine
  modified_base 86: mod_base = OTHER; note = 2'-O-methyl cytidine
  modified_base 87: mod_base = OTHER; note = 2'-O-methyl guanosine
  modified_base 88: mod_base = OTHER; note = 2'-O-methyl adenosine
  modified_base 89: mod_base = OTHER; note = 2'-O-methyl guanosine
  modified_base 90: mod_base = OTHER; note = 2'-O-methyl uridine
  modified_base 91: mod_base = OTHER; note = 2'-O-methyl cytidine
  modified_base 92: mod_base = OTHER; note = 2'-O-methyl guanosine
  modified_base 93: mod_base = OTHER; note = 2'-O-methyl guanosine
  modified_base 94: mod_base = OTHER; note = 2'-O-methyl uridine
  modified_base 95: mod_base = OTHER; note = 2'-O-methyl guanosine
  modified_base 96: mod_base = OTHER; note = 2'-O-methyl cytidine
  modified_base 123: mod_base = OTHER; note = guanosine phosphorothioate
  modified_base 124: mod_base = OTHER; note = 2'-O-methyl uridine phosphorothioate
  modified_base 125: mod_base = OTHER; note = 2'-O-methyl guanosine phosphorothioate
  modified_base 126: mod_base = OTHER; note = 2'-O-methyl cytidine
catggtgcacctgactcctggttttagagctagaaatagcaagttaaaataaggctagtccgttatcaacttgaaaaagtggcaccgagtcggtgcacggcagatttctctgccggagtcaggtgc

SEQ ID NO: 20883 - RNA, 126 nt, synthetic construct
  source 1..126: mol_type = other RNA
  modified_base 1: mod_base = OTHER; note = 2'-O-methyl cytidine phosphorothioate
  modified_base 2: mod_base = OTHER; note = 2'-O-methyl adenosine phosphorothioate
  modified_base 3: mod_base = OTHER; note = 2'-O-methyl uridine phosphorothioate
  modified_base 29: mod_base = OTHER; note = 2'-O-methyl guanosine
  modified_base 30: mod_base = OTHER; note = 2'-O-methyl cytidine
  modified_base 31: mod_base = OTHER; note = 2'-O-methyl uridine
  modified_base 32: mod_base = OTHER; note = 2'-O-methyl adenosine
  modified_base 33: mod_base = OTHER; note = 2'-O-methyl guanosine
  modified_base 34: mod_base = OTHER; note = 2'-O-methyl adenosine
  modified_base 35: mod_base = OTHER; note = 2'-O-methyl adenosine
  modified_base 36: mod_base = OTHER; note = 2'-O-methyl adenosine
  modified_base 37: mod_base = OTHER; note = 2'-O-methyl uridine
  modified_base 38: mod_base = OTHER; note = 2'-O-methyl adenosine
  modified_base 39: mod_base = OTHER; note = 2'-O-methyl guanosine
  modified_base 40: mod_base = OTHER; note = 2'-O-methyl cytidine
  modified_base 69: mod_base = OTHER; note = 2'-O-methyl adenosine
  modified_base 70: mod_base = OTHER; note = 2'-O-methyl cytidine
  modified_base 71: mod_base = OTHER; note = 2'-O-methyl uridine
  modified_base 72: mod_base = OTHER; note = 2'-O-methyl uridine
  modified_base 73: mod_base = OTHER; note = 2'-O-methyl guanosine
  modified_base 74: mod_base = OTHER; note = 2'-O-methyl adenosine
  modified_base 75: mod_base = OTHER; note = 2'-O-methyl adenosine
  modified_base 76: mod_base = OTHER; note = 2'-O-methyl adenosine
  modified_base 77: mod_base = OTHER; note = 2'-O-methyl adenosine
  modified_base 78: mod_base = OTHER; note = 2'-O-methyl adenosine
  modified_base 79: mod_base = OTHER; note = 2'-O-methyl guanosine
  modified_base 80: mod_base = OTHER; note = 2'-O-methyl uridine
  modified_base 81: mod_base = OTHER; note = 2'-O-methyl guanosine
  modified_base 82: mod_base = OTHER; note = 2'-O-methyl guanosine
  modified_base 83: mod_base = OTHER; note = 2'-O-methyl cytidine
  modified_base 84: mod_base = OTHER; note = 2'-O-methyl adenosine
  modified_base 85: mod_base = OTHER; note = 2'-O-methyl cytidine
  modified_base 86: mod_base = OTHER; note = 2'-O-methyl cytidine
  modified_base 87: mod_base = OTHER; note = 2'-O-methyl guanosine
  modified_base 88: mod_base = OTHER; note = 2'-O-methyl adenosine
  modified_base 89: mod_base = OTHER; note = 2'-O-methyl guanosine
  modified_base 90: mod_base = OTHER; note = 2'-O-methyl uridine
  modified_base 91: mod_base = OTHER; note = 2'-O-methyl cytidine
  modified_base 92: mod_base = OTHER; note = 2'-O-methyl guanosine
  modified_base 93: mod_base = OTHER; note = 2'-O-methyl guanosine
  modified_base 94: mod_base = OTHER; note = 2'-O-methyl uridine
  modified_base 95: mod_base = OTHER; note = 2'-O-methyl guanosine
  modified_base 96: mod_base = OTHER; note = 2'-O-methyl cytidine
  modified_base 123: mod_base = OTHER; note = guanosine phosphorothioate
  modified_base 124: mod_base = OTHER; note = 2'-O-methyl uridine phosphorothioate
  modified_base 125: mod_base = OTHER; note = 2'-O-methyl guanosine phosphorothioate
  modified_base 126: mod_base = OTHER; note = 2'-O-methyl cytidine
catggtgcacctgactcctggttttagagctagaaatagcaagttaaaataaggctagtccgttatcaacttgaaaaagtggcaccgagtcggtgcacggcagatttctctgcgggagtcaggtgc

SEQ ID NO: 20884 - RNA, 126 nt, synthetic construct
  source 1..126: mol_type = other RNA
  modified_base 1: mod_base = OTHER; note = 2'-O-methyl cytidine phosphorothioate
  modified_base 2: mod_base = OTHER; note = 2'-O-methyl adenosine phosphorothioate
  modified_base 3: mod_base = OTHER; note = 2'-O-methyl uridine phosphorothioate
  modified_base 29: mod_base = OTHER; note = 2'-O-methyl guanosine
  modified_base 30: mod_base = OTHER; note = 2'-O-methyl cytidine
  modified_base 31: mod_base = OTHER; note = 2'-O-methyl uridine
  modified_base 32: mod_base = OTHER; note = 2'-O-methyl adenosine
  modified_base 33: mod_base = OTHER; note = 2'-O-methyl guanosine
  modified_base 34: mod_base = OTHER; note = 2'-O-methyl adenosine
  modified_base 35: mod_base = OTHER; note = 2'-O-methyl adenosine
  modified_base 36: mod_base = OTHER; note = 2'-O-methyl adenosine
  modified_base 37: mod_base = OTHER; note = 2'-O-methyl uridine
  modified_base 38: mod_base = OTHER; note = 2'-O-methyl adenosine
  modified_base 39: mod_base = OTHER; note = 2'-O-methyl guanosine
  modified_base 40: mod_base = OTHER; note = 2'-O-methyl cytidine
  modified_base 69: mod_base = OTHER; note = 2'-O-methyl adenosine
  modified_base 70: mod_base = OTHER; note = 2'-O-methyl cytidine
  modified_base 71: mod_base = OTHER; note = 2'-O-methyl uridine
  modified_base 72: mod_base = OTHER; note = 2'-O-methyl uridine
  modified_base 73: mod_base = OTHER; note = 2'-O-methyl guanosine
  modified_base 74: mod_base = OTHER; note = 2'-O-methyl adenosine
  modified_base 75: mod_base = OTHER; note = 2'-O-methyl adenosine
  modified_base 76: mod_base = OTHER; note = 2'-O-methyl adenosine
  modified_base 77: mod_base = OTHER; note = 2'-O-methyl adenosine
  modified_base 78: mod_base = OTHER; note = 2'-O-methyl adenosine
  modified_base 79: mod_base = OTHER; note = 2'-O-methyl guanosine
  modified_base 80: mod_base = OTHER; note = 2'-O-methyl uridine
  modified_base 81: mod_base = OTHER; note = 2'-O-methyl guanosine
  modified_base 82: mod_base = OTHER; note = 2'-O-methyl guanosine
  modified_base 83: mod_base = OTHER; note = 2'-O-methyl cytidine
  modified_base 84: mod_base = OTHER; note = 2'-O-methyl adenosine
  modified_base 85: mod_base = OTHER; note = 2'-O-methyl cytidine
  modified_base 86: mod_base = OTHER; note = 2'-O-methyl cytidine
  modified_base 87: mod_base = OTHER; note = 2'-O-methyl guanosine
  modified_base 88: mod_base = OTHER; note = 2'-O-methyl adenosine
  modified_base 89: mod_base = OTHER; note = 2'-O-methyl guanosine
  modified_base 90: mod_base = OTHER; note = 2'-O-methyl uridine
  modified_base 91: mod_base = OTHER; note = 2'-O-methyl cytidine
  modified_base 92: mod_base = OTHER; note = 2'-O-methyl guanosine
  modified_base 93: mod_base = OTHER; note = 2'-O-methyl guanosine
  modified_base 94: mod_base = OTHER; note = 2'-O-methyl uridine
  modified_base 95: mod_base = OTHER; note = 2'-O-methyl guanosine
  modified_base 96: mod_base = OTHER; note = 2'-O-methyl cytidine
  modified_base 123: mod_base = OTHER; note = guanosine phosphorothioate
  modified_base 124: mod_base = OTHER; note = 2'-O-methyl uridine phosphorothioate
  modified_base 125: mod_base = OTHER; note = 2'-O-methyl guanosine phosphorothioate
  modified_base 126: mod_base = OTHER; note = 2'-O-methyl cytidine
catggtgcacctgactcctggttttagagctagaaatagcaagttaaaataaggctagtccgttatcaacttgaaaaagtggcaccgagtcggtgcacggcagatttctctgctggagtcaggtgc

SEQ ID NO: 20885 - RNA, 126 nt, synthetic construct
  source 1..126: mol_type = other RNA
  modified_base 1: mod_base = OTHER; note = 2'-O-methyl cytidine phosphorothioate
  modified_base 2: mod_base = OTHER; note = 2'-O-methyl adenosine phosphorothioate
  modified_base 3: mod_base = OTHER; note = 2'-O-methyl uridine phosphorothioate
  modified_base 29: mod_base = OTHER; note = 2'-O-methyl guanosine
  modified_base 30: mod_base = OTHER; note = 2'-O-methyl cytidine
  modified_base 31: mod_base = OTHER; note = 2'-O-methyl uridine
  modified_base 32: mod_base = OTHER; note = 2'-O-methyl adenosine
  modified_base 33: mod_base = OTHER; note = 2'-O-methyl guanosine
  modified_base 34: mod_base = OTHER; note = 2'-O-methyl adenosine
  modified_base 35: mod_base = OTHER; note = 2'-O-methyl adenosine
  modified_base 36: mod_base = OTHER; note = 2'-O-methyl adenosine
  modified_base 37: mod_base = OTHER; note = 2'-O-methyl uridine
  modified_base 38: mod_base = OTHER; note = 2'-O-methyl adenosine
  modified_base 39: mod_base = OTHER; note = 2'-O-methyl guanosine
  modified_base 40: mod_base = OTHER; note = 2'-O-methyl cytidine
  modified_base 69: mod_base = OTHER; note = 2'-O-methyl adenosine
  modified_base 70: mod_base = OTHER; note = 2'-O-methyl cytidine
  modified_base 71: mod_base = OTHER; note = 2'-O-methyl uridine
  modified_base 72: mod_base = OTHER; note = 2'-O-methyl uridine
  modified_base 73: mod_base = OTHER; note = 2'-O-methyl guanosine
  modified_base 74: mod_base = OTHER; note = 2'-O-methyl adenosine
  modified_base 75: mod_base = OTHER; note = 2'-O-methyl adenosine
  modified_base 76: mod_base = OTHER; note = 2'-O-methyl adenosine
  modified_base 77: mod_base = OTHER; note = 2'-O-methyl adenosine
  modified_base 78: mod_base = OTHER; note = 2'-O-methyl adenosine
  modified_base 79: mod_base = OTHER; note = 2'-O-methyl guanosine
  modified_base 80: mod_base = OTHER; note = 2'-O-methyl uridine
  modified_base 81: mod_base = OTHER; note = 2'-O-methyl guanosine
  modified_base 82: mod_base = OTHER; note = 2'-O-methyl guanosine
  modified_base 83: mod_base = OTHER; note = 2'-O-methyl cytidine
  modified_base 84: mod_base = OTHER; note = 2'-O-methyl adenosine
  modified_base 85: mod_base = OTHER; note = 2'-O-methyl cytidine
  modified_base 86: mod_base = OTHER; note = 2'-O-methyl cytidine
  modified_base 87: mod_base = OTHER; note = 2'-O-methyl guanosine
  modified_base 88: mod_base = OTHER; note = 2'-O-methyl adenosine
  modified_base 89: mod_base = OTHER; note = 2'-O-methyl guanosine
  modified_base 90: mod_base = OTHER; note = 2'-O-methyl uridine
  modified_base 91: mod_base = OTHER; note = 2'-O-methyl cytidine
  modified_base 92: mod_base = OTHER; note = 2'-O-methyl guanosine
  modified_base 93: mod_base = OTHER; note = 2'-O-methyl guanosine
  modified_base 94: mod_base = OTHER; note = 2'-O-methyl uridine
  modified_base 95: mod_base = OTHER; note = 2'-O-methyl guanosine
  modified_base 96: mod_base = OTHER; note = 2'-O-methyl cytidine
  modified_base 123: mod_base = OTHER; note = guanosine phosphorothioate
  modified_base 124: mod_base = OTHER; note = 2'-O-methyl uridine phosphorothioate
  modified_base 125: mod_base = OTHER; note = 2'-O-methyl guanosine phosphorothioate
  modified_base 126: mod_base = OTHER; note = 2'-O-methyl cytidine
catggtgcacctgactcctggttttagagctagaaatagcaagttaaaataaggctagtccgttatcaacttgaaaaagtggcaccgagtcggtgcacggcagatttttctgcaggagtcaggtgc

SEQ ID NO: 20886 - RNA, 126 nt, synthetic construct
  source 1..126: mol_type = other RNA
  modified_base 1: mod_base = OTHER; note = 2'-O-methyl cytidine phosphorothioate
  modified_base 2: mod_base = OTHER; note = 2'-O-methyl adenosine phosphorothioate
  modified_base 3: mod_base = OTHER; note = 2'-O-methyl uridine phosphorothioate
  modified_base 29: mod_base = OTHER; note = 2'-O-methyl guanosine
  modified_base 30: mod_base = OTHER; note = 2'-O-methyl cytidine
  modified_base 31: mod_base = OTHER; note = 2'-O-methyl uridine
  modified_base 32: mod_base = OTHER; note = 2'-O-methyl adenosine
  modified_base 33: mod_base = OTHER; note = 2'-O-methyl guanosine
  modified_base 34: mod_base = OTHER; note = 2'-O-methyl adenosine
  modified_base 35: mod_base = OTHER; note = 2'-O-methyl adenosine
  modified_base 36: mod_base = OTHER; note = 2'-O-methyl adenosine
  modified_base 37: mod_base = OTHER; note = 2'-O-methyl uridine
  modified_base 38: mod_base = OTHER; note = 2'-O-methyl adenosine
  modified_base 39: mod_base = OTHER; note = 2'-O-methyl guanosine
  modified_base 40: mod_base = OTHER; note = 2'-O-methyl cytidine
  modified_base 69: mod_base = OTHER; note = 2'-O-methyl adenosine
  modified_base 70: mod_base = OTHER; note = 2'-O-methyl cytidine
  modified_base 71: mod_base = OTHER; note = 2'-O-methyl uridine
  modified_base 72: mod_base = OTHER; note = 2'-O-methyl uridine
  modified_base 73: mod_base = OTHER; note = 2'-O-methyl guanosine
  modified_base 74: mod_base = OTHER; note = 2'-O-methyl adenosine
  modified_base 75: mod_base = OTHER; note = 2'-O-methyl adenosine
  modified_base 76: mod_base = OTHER; note = 2'-O-methyl adenosine
  modified_base 77: mod_base = OTHER; note = 2'-O-methyl adenosine
  modified_base 78: mod_base = OTHER; note = 2'-O-methyl adenosine
  modified_base 79: mod_base = OTHER; note = 2'-O-methyl guanosine
  modified_base 80: mod_base = OTHER; note = 2'-O-methyl uridine
  modified_base 81: mod_base = OTHER; note = 2'-O-methyl guanosine
  modified_base 82: mod_base = OTHER; note = 2'-O-methyl guanosine
  modified_base 83: mod_base = OTHER; note = 2'-O-methyl cytidine
  modified_base 84: mod_base = OTHER; note = 2'-O-methyl adenosine
  modified_base 85: mod_base = OTHER; note = 2'-O-methyl cytidine
  modified_base 86: mod_base = OTHER; note = 2'-O-methyl cytidine
  modified_base 87: mod_base = OTHER; note = 2'-O-methyl guanosine
  modified_base 88: mod_base = OTHER; note = 2'-O-methyl adenosine
  modified_base 89: mod_base = OTHER; note = 2'-O-methyl guanosine
  modified_base 90: mod_base = OTHER; note = 2'-O-methyl uridine
  modified_base 91: mod_base = OTHER; note = 2'-O-methyl cytidine
  modified_base 92: mod_base = OTHER; note = 2'-O-methyl guanosine
  modified_base 93: mod_base = OTHER; note = 2'-O-methyl guanosine
  modified_base 94: mod_base = OTHER; note = 2'-O-methyl uridine
  modified_base 95: mod_base = OTHER; note = 2'-O-methyl guanosine
  modified_base 96: mod_base = OTHER; note = 2'-O-methyl cytidine
  modified_base 123: mod_base = OTHER; note = guanosine phosphorothioate
  modified_base 124: mod_base = OTHER; note = 2'-O-methyl uridine phosphorothioate
  modified_base 125: mod_base = OTHER; note = 2'-O-methyl guanosine phosphorothioate
  modified_base 126: mod_base = OTHER; note = 2'-O-methyl cytidine
catggtgcacctgactcctggttttagagctagaaatagcaagttaaaataaggctagtccgttatcaacttgaaaaagtggcaccgagtcggtgcacggcagatttttctgccggagtcaggtgc

SEQ ID NO: 20887 - RNA, 126 nt, synthetic construct
  source 1..126: mol_type = other RNA
  modified_base 1: mod_base = OTHER; note = 2'-O-methyl cytidine phosphorothioate
  modified_base 2: mod_base = OTHER; note = 2'-O-methyl adenosine phosphorothioate
  modified_base 3: mod_base = OTHER; note = 2'-O-methyl uridine phosphorothioate
  modified_base 29: mod_base = OTHER; note = 2'-O-methyl guanosine
  modified_base 30: mod_base = OTHER; note = 2'-O-methyl cytidine
  modified_base 31: mod_base = OTHER; note = 2'-O-methyl uridine
  modified_base 32: mod_base = OTHER; note = 2'-O-methyl adenosine
  modified_base 33: mod_base = OTHER; note = 2'-O-methyl guanosine
  modified_base 34: mod_base = OTHER; note = 2'-O-methyl adenosine
  modified_base 35: mod_base = OTHER; note = 2'-O-methyl adenosine
  modified_base 36: mod_base = OTHER; note = 2'-O-methyl adenosine
  modified_base 37: mod_base = OTHER; note = 2'-O-methyl uridine
  modified_base 38: mod_base = OTHER; note = 2'-O-methyl adenosine
  modified_base 39: mod_base = OTHER; note = 2'-O-methyl guanosine
  modified_base 40: mod_base = OTHER; note = 2'-O-methyl cytidine
  modified_base 69: mod_base = OTHER; note = 2'-O-methyl adenosine
  modified_base 70: mod_base = OTHER; note = 2'-O-methyl cytidine
  modified_base 71: mod_base = OTHER; note = 2'-O-methyl uridine
  modified_base 72: mod_base = OTHER; note = 2'-O-methyl uridine
  modified_base 73: mod_base = OTHER; note = 2'-O-methyl guanosine
  modified_base 74: mod_base = OTHER; note = 2'-O-methyl adenosine
  modified_base 75: mod_base = OTHER; note = 2'-O-methyl adenosine
  modified_base 76: mod_base = OTHER; note = 2'-O-methyl adenosine
  modified_base 77: mod_base = OTHER; note = 2'-O-methyl adenosine
  modified_base 78: mod_base = OTHER; note = 2'-O-methyl adenosine
  modified_base 79: mod_base = OTHER; note = 2'-O-methyl guanosine
  modified_base 80: mod_base = OTHER; note = 2'-O-methyl uridine
  modified_base 81: mod_base = OTHER; note = 2'-O-methyl guanosine
  modified_base 82: mod_base = OTHER; note = 2'-O-methyl guanosine
  modified_base 83: mod_base = OTHER; note = 2'-O-methyl cytidine
  modified_base 84: mod_base = OTHER; note = 2'-O-methyl adenosine
  modified_base 85: mod_base = OTHER; note = 2'-O-methyl cytidine
  modified_base 86: mod_base = OTHER; note = 2'-O-methyl cytidine
  modified_base 87: mod_base = OTHER; note = 2'-O-methyl guanosine
  modified_base 88: mod_base = OTHER; note = 2'-O-methyl adenosine
  modified_base 89: mod_base = OTHER; note = 2'-O-methyl guanosine
  modified_base 90: mod_base = OTHER; note = 2'-O-methyl uridine
  modified_base 91: mod_base = OTHER; note = 2'-O-methyl cytidine
  modified_base 92: mod_base = OTHER; note = 2'-O-methyl guanosine
  modified_base 93: mod_base = OTHER; note = 2'-O-methyl guanosine
  modified_base 94: mod_base = OTHER; note = 2'-O-methyl uridine
  modified_base 95: mod_base = OTHER; note = 2'-O-methyl guanosine
  modified_base 96: mod_base = OTHER; note = 2'-O-methyl cytidine
  modified_base 123: mod_base = OTHER; note = guanosine phosphorothioate
  modified_base 124: mod_base = OTHER; note = 2'-O-methyl uridine phosphorothioate
  modified_base 125: mod_base = OTHER; note = 2'-O-methyl guanosine phosphorothioate
  modified_base 126: mod_base = OTHER; note = 2'-O-methyl cytidine
catggtgcacctgactcctggttttagagctagaaatagcaagttaaaataaggctagtccgttatcaacttgaaaaagtggcaccgagtcggtgcacggcagatttttctgcgggagtcaggtgc

SEQ ID NO: 20888 - RNA, 126 nt, synthetic construct
  source 1..126: mol_type = other RNA
  modified_base 1: mod_base = OTHER; note = 2'-O-methyl cytidine phosphorothioate
  modified_base 2: mod_base = OTHER; note = 2'-O-methyl adenosine phosphorothioate
  modified_base 3: mod_base = OTHER; note = 2'-O-methyl uridine phosphorothioate
  modified_base 29: mod_base = OTHER; note = 2'-O-methyl guanosine
  modified_base 30: mod_base = OTHER; note = 2'-O-methyl cytidine
  modified_base 31: mod_base = OTHER; note = 2'-O-methyl uridine
  modified_base 32: mod_base = OTHER; note = 2'-O-methyl adenosine
  modified_base 33: mod_base = OTHER; note = 2'-O-methyl guanosine
  modified_base 34: mod_base = OTHER; note = 2'-O-methyl adenosine
  modified_base 35: mod_base = OTHER; note = 2'-O-methyl adenosine
  modified_base 36: mod_base = OTHER; note = 2'-O-methyl adenosine
  modified_base 37: mod_base = OTHER; note = 2'-O-methyl uridine
  modified_base 38: mod_base = OTHER; note = 2'-O-methyl adenosine
  modified_base 39: mod_base = OTHER; note = 2'-O-methyl guanosine
  modified_base 40: mod_base = OTHER; note = 2'-O-methyl cytidine
  modified_base 69: mod_base = OTHER; note = 2'-O-methyl adenosine
  modified_base 70: mod_base = OTHER; note = 2'-O-methyl cytidine
  modified_base 71: mod_base = OTHER; note = 2'-O-methyl uridine
  modified_base 72: mod_base = OTHER; note = 2'-O-methyl uridine
  modified_base 73: mod_base = OTHER; note = 2'-O-methyl guanosine
  modified_base 74: mod_base = OTHER; note = 2'-O-methyl adenosine
  modified_base 75: mod_base = OTHER; note = 2'-O-methyl adenosine
  modified_base 76: mod_base = OTHER; note = 2'-O-methyl adenosine
  modified_base 77: mod_base = OTHER; note = 2'-O-methyl adenosine
  modified_base 78: mod_base = OTHER; note = 2'-O-methyl adenosine
  modified_base 79: mod_base = OTHER; note = 2'-O-methyl guanosine
  modified_base 80: mod_base = OTHER; note = 2'-O-methyl uridine
  modified_base 81: mod_base = OTHER; note = 2'-O-methyl guanosine
  modified_base 82: mod_base = OTHER; note = 2'-O-methyl guanosine
  modified_base 83: mod_base = OTHER; note = 2'-O-methyl cytidine
  modified_base 84: mod_base = OTHER; note = 2'-O-methyl adenosine
  modified_base 85: mod_base = OTHER; note = 2'-O-methyl cytidine
  modified_base 86: mod_base = OTHER; note = 2'-O-methyl cytidine
  modified_base 87: mod_base = OTHER; note = 2'-O-methyl guanosine
  modified_base 88: mod_base = OTHER; note = 2'-O-methyl adenosine
  modified_base 89: mod_base = OTHER; note = 2'-O-methyl guanosine
  modified_base 90: mod_base = OTHER; note = 2'-O-methyl uridine
  modified_base 91: mod_base = OTHER; note = 2'-O-methyl cytidine
  modified_base 92: mod_base = OTHER; note = 2'-O-methyl guanosine
  modified_base 93: mod_base = OTHER; note = 2'-O-methyl guanosine
  modified_base 94: mod_base = OTHER; note = 2'-O-methyl uridine
  modified_base 95: mod_base = OTHER; note = 2'-O-methyl guanosine
  modified_base 96: mod_base = OTHER; note = 2'-O-methyl cytidine
  modified_base 123: mod_base = OTHER; note = guanosine phosphorothioate
  modified_base 124: mod_base = OTHER; note = 2'-O-methyl uridine phosphorothioate
  modified_base 125: mod_base = OTHER; note = 2'-O-methyl guanosine phosphorothioate
  modified_base 126: mod_base = OTHER; note = 2'-O-methyl cytidine
catggtgcacctgactcctggttttagagctagaaatagcaagttaaaataaggctagtccgttatcaacttgaaaaagtggcaccgagtcggtgcacggcagatttttctgctggagtcaggtgc

SEQ ID NO: 20889 - RNA, 128 nt, synthetic construct
  source 1..128: mol_type = other RNA
  modified_base 1: mod_base = OTHER; note = 2'-O-methyl cytidine phosphorothioate
  modified_base 2: mod_base = OTHER; note = 2'-O-methyl adenosine phosphorothioate
  modified_base 3: mod_base = OTHER; note = 2'-O-methyl uridine phosphorothioate
  modified_base 29: mod_base = OTHER; note = 2'-O-methyl guanosine
  modified_base 30: mod_base = OTHER; note = 2'-O-methyl cytidine
  modified_base 31: mod_base = OTHER; note = 2'-O-methyl uridine
  modified_base 32: mod_base = OTHER; note = 2'-O-methyl adenosine
  modified_base 33: mod_base = OTHER; note = 2'-O-methyl guanosine
  modified_base 34: mod_base = OTHER; note = 2'-O-methyl adenosine
  modified_base 35: mod_base = OTHER; note = 2'-O-methyl adenosine
  modified_base 36: mod_base = OTHER; note = 2'-O-methyl adenosine
  modified_base 37: mod_base = OTHER; note = 2'-O-methyl uridine
  modified_base 38: mod_base = OTHER; note = 2'-O-methyl adenosine
  modified_base 39: mod_base = OTHER; note = 2'-O-methyl guanosine
  modified_base 40: mod_base = OTHER; note = 2'-O-methyl cytidine
  modified_base 69: mod_base = OTHER; note = 2'-O-methyl adenosine
  modified_base 70: mod_base = OTHER; note = 2'-O-methyl cytidine
  modified_base 71: mod_base = OTHER; note = 2'-O-methyl uridine
  modified_base 72: mod_base = OTHER; note = 2'-O-methyl uridine
  modified_base 73: mod_base = OTHER; note = 2'-O-methyl guanosine
  modified_base 74: mod_base = OTHER; note = 2'-O-methyl adenosine
  modified_base 75: mod_base = OTHER; note = 2'-O-methyl adenosine
  modified_base 76: mod_base = OTHER; note = 2'-O-methyl adenosine
  modified_base 77: mod_base = OTHER; note = 2'-O-methyl adenosine
  modified_base 78: mod_base = OTHER; note = 2'-O-methyl adenosine
  modified_base 79: mod_base = OTHER; note = 2'-O-methyl guanosine
  modified_base 80: mod_base = OTHER; note = 2'-O-methyl uridine
  modified_base 81: mod_base = OTHER; note = 2'-O-methyl guanosine
  modified_base 82: mod_base = OTHER; note = 2'-O-methyl guanosine
  modified_base 83: mod_base = OTHER; note = 2'-O-methyl cytidine
  modified_base 84: mod_base = OTHER; note = 2'-O-methyl adenosine
  modified_base 85: mod_base = OTHER; note = 2'-O-methyl cytidine
  modified_base 86: mod_base = OTHER; note = 2'-O-methyl cytidine
  modified_base 87: mod_base = OTHER; note = 2'-O-methyl guanosine
  modified_base 88: mod_base = OTHER; note = 2'-O-methyl adenosine
  modified_base 89: mod_base = OTHER; note = 2'-O-methyl guanosine
  modified_base 90: mod_base = OTHER; note = 2'-O-methyl uridine
  modified_base 91: mod_base = OTHER; note = 2'-O-methyl cytidine
  modified_base 92: mod_base = OTHER; note = 2'-O-methyl guanosine
  modified_base 93: mod_base = OTHER; note = 2'-O-methyl guanosine
  modified_base 94: mod_base = OTHER; note = 2'-O-methyl uridine
  modified_base 95: mod_base = OTHER; note = 2'-O-methyl guanosine
  modified_base 96: mod_base = OTHER; note = 2'-O-methyl cytidine
  modified_base 125: mod_base = OTHER; note = guanosine phosphorothioate
  modified_base 126: mod_base = OTHER; note = 2'-O-methyl uridine phosphorothioate
  modified_base 127: mod_base = OTHER; note = 2'-O-methyl guanosine phosphorothioate
  modified_base 128: mod_base = OTHER; note = 2'-O-methyl cytidine
catggtgcacctgactcctggttttagagctagaaatagcaagttaaaataaggctagtccgttatcaacttgaaaaagtggcaccgagtcggtgctaacggcagacttctctgcaggagtcaggtgc

SEQ ID NO: 20890 - RNA, 128 nt, synthetic construct
  source 1..128: mol_type = other RNA
  modified_base 1: mod_base = OTHER; note = 2'-O-methyl cytidine phosphorothioate
  modified_base 2: mod_base = OTHER; note = 2'-O-methyl adenosine phosphorothioate
  modified_base 3: mod_base = OTHER; note = 2'-O-methyl uridine phosphorothioate
  modified_base 29: mod_base = OTHER; note = 2'-O-methyl guanosine
  modified_base 30: mod_base = OTHER; note = 2'-O-methyl cytidine
  modified_base 31: mod_base = OTHER; note = 2'-O-methyl uridine
  modified_base 32: mod_base = OTHER; note = 2'-O-methyl adenosine
  modified_base 33: mod_base = OTHER; note = 2'-O-methyl guanosine
  modified_base 34: mod_base = OTHER; note = 2'-O-methyl adenosine
  modified_base 35: mod_base = OTHER; note = 2'-O-methyl adenosine
  modified_base 36: mod_base = OTHER; note = 2'-O-methyl adenosine
  modified_base 37: mod_base = OTHER; note = 2'-O-methyl uridine
  modified_base 38: mod_base = OTHER; note = 2'-O-methyl adenosine
  modified_base 39: mod_base = OTHER; note = 2'-O-methyl guanosine
  modified_base 40: mod_base = OTHER; note = 2'-O-methyl cytidine
  modified_base 69: mod_base = OTHER; note = 2'-O-methyl adenosine
  modified_base 70: mod_base = OTHER; note = 2'-O-methyl cytidine
  modified_base 71: mod_base = OTHER; note = 2'-O-methyl uridine
  modified_base 72: mod_base = OTHER; note = 2'-O-methyl uridine
  modified_base 73: mod_base = OTHER; note = 2'-O-methyl guanosine
  modified_base 74: mod_base = OTHER; note = 2'-O-methyl adenosine
  modified_base 75: mod_base = OTHER; note = 2'-O-methyl adenosine
  modified_base 76: mod_base = OTHER; note = 2'-O-methyl adenosine
  modified_base 77: mod_base = OTHER; note = 2'-O-methyl adenosine
  modified_base 78: mod_base = OTHER; note = 2'-O-methyl adenosine
  modified_base 79: mod_base = OTHER; note = 2'-O-methyl guanosine
  modified_base 80: mod_base = OTHER; note = 2'-O-methyl uridine
  modified_base 81: mod_base = OTHER; note = 2'-O-methyl guanosine
  modified_base 82: mod_base = OTHER; note = 2'-O-methyl guanosine
  modified_base 83: mod_base = OTHER; note = 2'-O-methyl cytidine
  modified_base 84: mod_base = OTHER; note = 2'-O-methyl adenosine
  modified_base 85: mod_base = OTHER; note = 2'-O-methyl cytidine
  modified_base 86: mod_base = OTHER; note = 2'-O-methyl cytidine
  modified_base 87: mod_base = OTHER; note = 2'-O-methyl guanosine
  modified_base 88: mod_base = OTHER; note = 2'-O-methyl adenosine
  modified_base 89: mod_base = OTHER; note = 2'-O-methyl guanosine
  modified_base 90: mod_base = OTHER; note = 2'-O-methyl uridine
  modified_base 91: mod_base = OTHER; note = 2'-O-methyl cytidine
  modified_base 92: mod_base = OTHER; note = 2'-O-methyl guanosine
  modified_base 93: mod_base = OTHER; note = 2'-O-methyl guanosine
  modified_base 94: mod_base = OTHER; note = 2'-O-methyl uridine
  modified_base 95: mod_base = OTHER; note = 2'-O-methyl guanosine
  modified_base 96: mod_base = OTHER; note = 2'-O-methyl cytidine
  modified_base 125: mod_base = OTHER; note = guanosine phosphorothioate
  modified_base 126: mod_base = OTHER; note = 2'-O-methyl uridine phosphorothioate
  modified_base 127: mod_base = OTHER; note = 2'-O-methyl guanosine phosphorothioate
  modified_base 128: mod_base = OTHER; note = 2'-O-methyl cytidine
catggtgcacctgactcctggttttagagctagaaatagcaagttaaaataaggctagtccgttatcaacttgaaaaagtggcaccgagtcggtgctaacggcagacttctctgccggagtcaggtgc

SEQ ID NO: 20891 - RNA, 128 nt, synthetic construct
  source 1..128: mol_type = other RNA
  modified_base 1: mod_base = OTHER; note = 2'-O-methyl cytidine phosphorothioate
  modified_base 2: mod_base = OTHER; note = 2'-O-methyl adenosine phosphorothioate
  modified_base 3: mod_base = OTHER; note = 2'-O-methyl uridine phosphorothioate
  modified_base 29: mod_base = OTHER; note = 2'-O-methyl guanosine
  modified_base 30: mod_base = OTHER; note = 2'-O-methyl cytidine
  modified_base 31: mod_base = OTHER; note = 2'-O-methyl uridine
  modified_base 32: mod_base = OTHER; note = 2'-O-methyl adenosine
  modified_base 33: mod_base = OTHER; note = 2'-O-methyl guanosine
  modified_base 34: mod_base = OTHER; note = 2'-O-methyl adenosine
  modified_base 35: mod_base = OTHER; note = 2'-O-methyl adenosine
  modified_base 36: mod_base = OTHER; note = 2'-O-methyl adenosine
  modified_base 37: mod_base = OTHER; note = 2'-O-methyl uridine
  modified_base 38: mod_base = OTHER; note = 2'-O-methyl adenosine
  modified_base 39: mod_base = OTHER; note = 2'-O-methyl guanosine
  modified_base 40: mod_base = OTHER; note = 2'-O-methyl cytidine
  modified_base 69: mod_base = OTHER; note = 2'-O-methyl adenosine
  modified_base 70: mod_base = OTHER; note = 2'-O-methyl cytidine
  modified_base 71: mod_base = OTHER; note = 2'-O-methyl uridine
  modified_base 72: mod_base = OTHER; note = 2'-O-methyl uridine
  modified_base 73: mod_base = OTHER; note = 2'-O-methyl guanosine
  modified_base 74: mod_base = OTHER; note = 2'-O-methyl adenosine
  modified_base 75: mod_base = OTHER; note = 2'-O-methyl adenosine
  modified_base 76: mod_base = OTHER; note = 2'-O-methyl adenosine
  modified_base 77: mod_base = OTHER; note = 2'-O-methyl adenosine
  modified_base 78: mod_base = OTHER; note = 2'-O-methyl adenosine
  modified_base 79: mod_base = OTHER; note = 2'-O-methyl guanosine
  modified_base 80: mod_base = OTHER; note = 2'-O-methyl uridine
  modified_base 81: mod_base = OTHER; note = 2'-O-methyl guanosine
  modified_base 82: mod_base = OTHER; note = 2'-O-methyl guanosine
  modified_base 83: mod_base = OTHER; note = 2'-O-methyl cytidine
  modified_base 84: mod_base = OTHER; note = 2'-O-methyl adenosine
  modified_base 85: mod_base = OTHER; note = 2'-O-methyl cytidine
  modified_base 86: mod_base = OTHER; note = 2'-O-methyl cytidine
  modified_base 87: mod_base = OTHER; note = 2'-O-methyl guanosine
  modified_base 88: mod_base = OTHER; note = 2'-O-methyl adenosine
  modified_base 89: mod_base = OTHER; note = 2'-O-methyl guanosine
  modified_base 90: mod_base = OTHER; note = 2'-O-methyl uridine
  modified_base 91: mod_base = OTHER; note = 2'-O-methyl cytidine
  modified_base 92: mod_base = OTHER; note = 2'-O-methyl guanosine
  modified_base 93: mod_base = OTHER; note = 2'-O-methyl guanosine
  modified_base 94: mod_base = OTHER; note = 2'-O-methyl uridine
  modified_base 95: mod_base = OTHER; note = 2'-O-methyl guanosine
  modified_base 96: mod_base = OTHER; note = 2'-O-methyl cytidine
  modified_base 125: mod_base = OTHER; note = guanosine phosphorothioate
  modified_base 126: mod_base = OTHER; note = 2'-O-methyl uridine phosphorothioate
  modified_base 127: mod_base = OTHER; note = 2'-O-methyl guanosine phosphorothioate
  modified_base 128: mod_base = OTHER; note = 2'-O-methyl cytidine
catggtgcacctgactcctggttttagagctagaaatagcaagttaaaataaggctagtccgttatcaacttgaaaaagtggcaccgagtcggtgctaacggcagacttctctgcgggagtcaggtgc

SEQ ID NO: 20892 - RNA, 128 nt, synthetic construct
  source 1..128: mol_type = other RNA
  modified_base 1: mod_base = OTHER; note = 2'-O-methyl cytidine phosphorothioate
  modified_base 2: mod_base = OTHER; note = 2'-O-methyl adenosine phosphorothioate
  modified_base 3: mod_base = OTHER; note = 2'-O-methyl uridine phosphorothioate
  modified_base 29: mod_base = OTHER; note = 2'-O-methyl guanosine
  modified_base 30: mod_base = OTHER; note = 2'-O-methyl cytidine
  modified_base 31: mod_base = OTHER; note = 2'-O-methyl uridine
  modified_base 32: mod_base = OTHER; note = 2'-O-methyl adenosine
  modified_base 33: mod_base = OTHER; note = 2'-O-methyl guanosine
  modified_base 34: mod_base = OTHER; note = 2'-O-methyl adenosine
  modified_base 35: mod_base = OTHER; note = 2'-O-methyl adenosine
  modified_base 36: mod_base = OTHER; note = 2'-O-methyl adenosine
  modified_base 37: mod_base = OTHER; note = 2'-O-methyl uridine
  modified_base 38: mod_base = OTHER; note = 2'-O-methyl adenosine
  modified_base 39: mod_base = OTHER; note = 2'-O-methyl guanosine
  modified_base 40: mod_base = OTHER; note = 2'-O-methyl cytidine
  modified_base 69: mod_base = OTHER; note = 2'-O-methyl adenosine
  modified_base 70: mod_base = OTHER; note = 2'-O-methyl cytidine
  modified_base 71: mod_base = OTHER; note = 2'-O-methyl uridine
  modified_base 72: mod_base = OTHER; note = 2'-O-methyl uridine
  modified_base 73: mod_base = OTHER; note = 2'-O-methyl guanosine
  modified_base 74: mod_base = OTHER; note = 2'-O-methyl adenosine
  modified_base 75: mod_base = OTHER; note = 2'-O-methyl adenosine
  modified_base 76: mod_base = OTHER; note = 2'-O-methyl adenosine
  modified_base 77: mod_base = OTHER; note = 2'-O-methyl adenosine
  modified_base 78: mod_base = OTHER; note = 2'-O-methyl adenosine
  modified_base 79: mod_base = OTHER; note = 2'-O-methyl guanosine
  modified_base 80: mod_base = OTHER; note = 2'-O-methyl uridine
  modified_base 81: mod_base = OTHER; note = 2'-O-methyl guanosine
  modified_base 82: mod_base = OTHER; note = 2'-O-methyl guanosine
  modified_base 83: mod_base = OTHER; note = 2'-O-methyl cytidine
  modified_base 84: mod_base = OTHER; note = 2'-O-methyl adenosine
  modified_base 85: mod_base = OTHER; note = 2'-O-methyl cytidine
  modified_base 86: mod_base = OTHER; note = 2'-O-methyl cytidine
  modified_base 87: mod_base = OTHER; note = 2'-O-methyl guanosine
  modified_base 88: mod_base = OTHER; note = 2'-O-methyl adenosine
  modified_base 89: mod_base = OTHER; note = 2'-O-methyl guanosine
  modified_base 90: mod_base = OTHER; note = 2'-O-methyl uridine
  modified_base 91: mod_base = OTHER; note = 2'-O-methyl cytidine
  modified_base 92: mod_base = OTHER; note = 2'-O-methyl guanosine
  modified_base 93: mod_base = OTHER; note = 2'-O-methyl guanosine
  modified_base 94: mod_base = OTHER; note = 2'-O-methyl uridine
  modified_base 95: mod_base = OTHER; note = 2'-O-methyl guanosine
  modified_base 96: mod_base = OTHER; note = 2'-O-methyl cytidine
  modified_base 125: mod_base = OTHER; note = guanosine phosphorothioate
  modified_base 126: mod_base = OTHER; note = 2'-O-methyl uridine phosphorothioate
  modified_base 127: mod_base = OTHER; note = 2'-O-methyl guanosine phosphorothioate
  modified_base 128: mod_base = OTHER; note = 2'-O-methyl cytidine
catggtgcacctgactcctggttttagagctagaaatagcaagttaaaataaggctagtccgttatcaacttgaaaaagtggcaccgagtcggtgctaacggcagacttctctgctggagtcaggtgc

SEQ ID NO: 20893 - RNA, 128 nt, synthetic construct
  source 1..128: mol_type = other RNA
  modified_base 1: mod_base = OTHER; note = 2'-O-methyl cytidine phosphorothioate
  modified_base 2: mod_base = OTHER; note = 2'-O-methyl adenosine phosphorothioate
  modified_base 3: mod_base = OTHER; note = 2'-O-methyl uridine phosphorothioate
  modified_base 29: mod_base = OTHER; note = 2'-O-methyl guanosine
  modified_base 30: mod_base = OTHER; note = 2'-O-methyl cytidine
  modified_base 31: mod_base = OTHER; note = 2'-O-methyl uridine
  modified_base 32: mod_base = OTHER; note = 2'-O-methyl adenosine
  modified_base 33: mod_base = OTHER; note = 2'-O-methyl guanosine
  modified_base 34: mod_base = OTHER; note = 2'-O-methyl adenosine
  modified_base 35: mod_base = OTHER; note = 2'-O-methyl adenosine
  modified_base 36: mod_base = OTHER; note = 2'-O-methyl adenosine
  modified_base 37: mod_base = OTHER; note = 2'-O-methyl uridine
  modified_base 38: mod_base = OTHER; note = 2'-O-methyl adenosine
  modified_base 39: mod_base = OTHER; note = 2'-O-methyl guanosine
  modified_base 40: mod_base = OTHER; note = 2'-O-methyl cytidine
  modified_base 69: mod_base = OTHER; note = 2'-O-methyl adenosine
  modified_base 70: mod_base = OTHER; note = 2'-O-methyl cytidine
  modified_base 71: mod_base = OTHER; note = 2'-O-methyl uridine
  modified_base 72: mod_base = OTHER; note = 2'-O-methyl uridine
  modified_base 73: mod_base = OTHER; note = 2'-O-methyl guanosine
  modified_base 74: mod_base = OTHER; note = 2'-O-methyl adenosine
  modified_base 75: mod_base = OTHER; note = 2'-O-methyl adenosine
  modified_base 76: mod_base = OTHER; note = 2'-O-methyl adenosine
  modified_base 77: mod_base = OTHER; note = 2'-O-methyl adenosine
  modified_base 78: mod_base = OTHER; note = 2'-O-methyl adenosine
  modified_base 79: mod_base = OTHER; note = 2'-O-methyl guanosine
  modified_base 80: mod_base = OTHER; note = 2'-O-methyl uridine
  modified_base 81: mod_base = OTHER; note = 2'-O-methyl guanosine
  modified_base 82: mod_base = OTHER; note = 2'-O-methyl guanosine
  modified_base 83: mod_base = OTHER; note = 2'-O-methyl cytidine
  modified_base 84: mod_base = OTHER; note = 2'-O-methyl adenosine
  modified_base 85: mod_base = OTHER; note = 2'-O-methyl cytidine
  modified_base 86: mod_base = OTHER; note = 2'-O-methyl cytidine
  modified_base 87: mod_base = OTHER; note = 2'-O-methyl guanosine
  modified_base 88: mod_base = OTHER; note = 2'-O-methyl adenosine
  modified_base 89: mod_base = OTHER; note = 2'-O-methyl guanosine
  modified_base 90: mod_base = OTHER; note = 2'-O-methyl uridine
  modified_base 91: mod_base = OTHER; note = 2'-O-methyl cytidine
  modified_base 92: mod_base = OTHER; note = 2'-O-methyl guanosine
  modified_base 93: mod_base = OTHER; note = 2'-O-methyl guanosine
  modified_base 94: mod_base = OTHER; note = 2'-O-methyl uridine
  modified_base 95: mod_base = OTHER; note = 2'-O-methyl guanosine
  modified_base 96: mod_base = OTHER; note = 2'-O-methyl cytidine
  modified_base 125: mod_base = OTHER; note = guanosine phosphorothioate
  modified_base 126: mod_base = OTHER; note = 2'-O-methyl uridine phosphorothioate
  modified_base 127: mod_base = OTHER; note = 2'-O-methyl guanosine phosphorothioate
  modified_base 128: mod_base = OTHER; note = 2'-O-methyl cytidine
catggtgcacctgactcctggttttagagctagaaatagcaagttaaaataaggctagtccgttatcaacttgaaaaagtggcaccgagtcggtgctaacggcagatttctctgcaggagtcaggtgc

SEQ ID NO: 20894 - RNA, 128 nt, synthetic construct
  source 1..128: mol_type = other RNA
  modified_base 1: mod_base = OTHER; note = 2'-O-methyl cytidine phosphorothioate
  modified_base 2: mod_base = OTHER; note = 2'-O-methyl adenosine phosphorothioate
  modified_base 3: mod_base = OTHER; note = 2'-O-methyl uridine phosphorothioate
  modified_base 29: mod_base = OTHER; note = 2'-O-methyl guanosine
  modified_base 30: mod_base = OTHER; note = 2'-O-methyl cytidine
  modified_base 31: mod_base = OTHER; note = 2'-O-methyl uridine
  modified_base 32: mod_base = OTHER; note = 2'-O-methyl adenosine
  modified_base 33: mod_base = OTHER; note = 2'-O-methyl guanosine
  modified_base 34: mod_base = OTHER; note = 2'-O-methyl adenosine
  modified_base 35: mod_base = OTHER; note = 2'-O-methyl adenosine
  modified_base 36: mod_base = OTHER; note = 2'-O-methyl adenosine
  modified_base 37: mod_base = OTHER; note = 2'-O-methyl uridine
  modified_base 38: mod_base = OTHER; note = 2'-O-methyl adenosine
  modified_base 39: mod_base = OTHER; note = 2'-O-methyl guanosine
  modified_base 40: mod_base = OTHER; note = 2'-O-methyl cytidine
  modified_base 69: mod_base = OTHER; note = 2'-O-methyl adenosine
  modified_base 70: mod_base = OTHER; note = 2'-O-methyl cytidine
  modified_base 71: mod_base = OTHER; note = 2'-O-methyl uridine
  modified_base 72: mod_base = OTHER; note = 2'-O-methyl uridine
  modified_base 73: mod_base = OTHER; note = 2'-O-methyl guanosine
  modified_base 74: mod_base = OTHER; note = 2'-O-methyl adenosine
  modified_base 75: mod_base = OTHER; note = 2'-O-methyl adenosine
  modified_base 76: mod_base = OTHER; note = 2'-O-methyl adenosine
  modified_base 77: mod_base = OTHER; note = 2'-O-methyl adenosine
  modified_base 78: mod_base = OTHER; note = 2'-O-methyl adenosine
  modified_base 79: mod_base = OTHER; note = 2'-O-methyl guanosine
  modified_base 80: mod_base = OTHER; note = 2'-O-methyl uridine
  modified_base 81: mod_base = OTHER; note = 2'-O-methyl guanosine
  modified_base 82: mod_base = OTHER; note = 2'-O-methyl guanosine
  modified_base 83: mod_base = OTHER; note = 2'-O-methyl cytidine
  modified_base 84: mod_base = OTHER; note = 2'-O-methyl adenosine
  modified_base 85: mod_base = OTHER; note = 2'-O-methyl cytidine
  modified_base 86: mod_base = OTHER; note = 2'-O-methyl cytidine
  modified_base 87: mod_base = OTHER; note = 2'-O-methyl guanosine
  modified_base 88: mod_base = OTHER; note = 2'-O-methyl adenosine
  modified_base 89: mod_base = OTHER; note = 2'-O-methyl guanosine
  modified_base 90: mod_base = OTHER; note = 2'-O-methyl uridine
  modified_base 91: mod_base = OTHER; note = 2'-O-methyl cytidine
  modified_base 92: mod_base = OTHER; note = 2'-O-methyl guanosine
  modified_base 93: mod_base = OTHER; note = 2'-O-methyl guanosine
  modified_base 94: mod_base = OTHER; note = 2'-O-methyl uridine
  modified_base 95: mod_base = OTHER; note = 2'-O-methyl guanosine
  modified_base 96: mod_base = OTHER; note = 2'-O-methyl cytidine
  modified_base 125: mod_base = OTHER; note = guanosine phosphorothioate
  modified_base 126: mod_base = OTHER; note = 2'-O-methyl uridine phosphorothioate
  modified_base 127: mod_base = OTHER; note = 2'-O-methyl guanosine phosphorothioate
  modified_base 128: mod_base = OTHER; note = 2'-O-methyl cytidine
catggtgcacctgactcctggttttagagctagaaatagcaagttaaaataaggctagtccgttatcaacttgaaaaagtggcaccgagtcggtgctaacggcagacttttctgcaggagtcaggtgc

SEQ ID NO: 20895 - RNA, 128 nt, synthetic construct
  source 1..128: mol_type = other RNA
  modified_base 1: mod_base = OTHER; note = 2'-O-methyl cytidine phosphorothioate
  modified_base 2: mod_base = OTHER; note = 2'-O-methyl adenosine phosphorothioate
  modified_base 3: mod_base = OTHER; note = 2'-O-methyl uridine phosphorothioate
  modified_base 29: mod_base = OTHER; note = 2'-O-methyl guanosine
  modified_base 30: mod_base = OTHER; note = 2'-O-methyl cytidine
  modified_base 31: mod_base = OTHER; note = 2'-O-methyl uridine
  modified_base 32: mod_base = OTHER; note = 2'-O-methyl adenosine
  modified_base 33: mod_base = OTHER; note = 2'-O-methyl guanosine
  modified_base 34: mod_base = OTHER; note = 2'-O-methyl adenosine
  modified_base 35: mod_base = OTHER; note = 2'-O-methyl adenosine
  modified_base 36: mod_base = OTHER; note = 2'-O-methyl adenosine
  modified_base 37: mod_base = OTHER; note = 2'-O-methyl uridine
  modified_base 38: mod_base = OTHER; note = 2'-O-methyl adenosine
  modified_base 39: mod_base = OTHER; note = 2'-O-methyl guanosine
  modified_base 40: mod_base = OTHER; note = 2'-O-methyl cytidine
  modified_base 69: mod_base = OTHER; note = 2'-O-methyl adenosine
  modified_base 70: mod_base = OTHER; note = 2'-O-methyl cytidine
  modified_base 71: mod_base = OTHER; note = 2'-O-methyl uridine
  modified_base 72: mod_base = OTHER; note = 2'-O-methyl uridine
  modified_base 73: mod_base = OTHER; note = 2'-O-methyl guanosine
  modified_base 74: mod_base = OTHER; note = 2'-O-methyl adenosine
  modified_base 75: mod_base = OTHER; note = 2'-O-methyl adenosine
  modified_base 76: mod_base = OTHER; note = 2'-O-methyl adenosine
  modified_base 77: mod_base = OTHER; note = 2'-O-methyl adenosine
  modified_base 78: mod_base = OTHER; note = 2'-O-methyl adenosine
  modified_base 79: mod_base = OTHER; note = 2'-O-methyl guanosine
  modified_base 80: mod_base = OTHER; note = 2'-O-methyl uridine
  modified_base 81: mod_base = OTHER; note = 2'-O-methyl guanosine
  modified_base 82: mod_base = OTHER; note = 2'-O-methyl guanosine
  modified_base 83: mod_base = OTHER; note = 2'-O-methyl cytidine
  modified_base 84: mod_base = OTHER; note = 2'-O-methyl adenosine
  modified_base 85: mod_base = OTHER; note = 2'-O-methyl cytidine
  modified_base 86: mod_base = OTHER; note = 2'-O-methyl cytidine
  modified_base 87: mod_base = OTHER; note = 2'-O-methyl guanosine
  modified_base 88: mod_base = OTHER; note = 2'-O-methyl adenosine
  modified_base 89: mod_base = OTHER; note = 2'-O-methyl guanosine
  modified_base 90: mod_base = OTHER; note = 2'-O-methyl uridine
  modified_base 91: mod_base = OTHER; note = 2'-O-methyl cytidine
  modified_base 92: mod_base = OTHER; note = 2'-O-methyl guanosine
  modified_base 93: mod_base = OTHER; note = 2'-O-methyl guanosine
  modified_base 94: mod_base = OTHER; note = 2'-O-methyl uridine
  modified_base 95: mod_base = OTHER; note = 2'-O-methyl guanosine
  modified_base 96: mod_base = OTHER; note = 2'-O-methyl cytidine
  modified_base 125: mod_base = OTHER; note = guanosine phosphorothioate
  modified_base 126: mod_base = OTHER; note = 2'-O-methyl uridine phosphorothioate
  modified_base 127: mod_base = OTHER; note = 2'-O-methyl guanosine phosphorothioate
  modified_base 128: mod_base = OTHER; note = 2'-O-methyl cytidine
catggtgcacctgactcctggttttagagctagaaatagcaagttaaaataaggctagtccgttatcaacttgaaaaagtggcaccgagtcggtgctaacggcagacttttctgccggagtcaggtgc

SEQ ID NO: 20896 - RNA, 128 nt, synthetic construct
  source 1..128: mol_type = other RNA
  modified_base 1: mod_base = OTHER; note = 2'-O-methyl cytidine phosphorothioate
  modified_base 2: mod_base = OTHER; note = 2'-O-methyl adenosine phosphorothioate
  modified_base 3: mod_base = OTHER; note = 2'-O-methyl uridine phosphorothioate
  modified_base 29: mod_base = OTHER; note = 2'-O-methyl guanosine
  modified_base 30: mod_base = OTHER; note = 2'-O-methyl cytidine
  modified_base 31: mod_base = OTHER; note = 2'-O-methyl uridine
  modified_base 32: mod_base = OTHER; note = 2'-O-methyl adenosine
  modified_base 33: mod_base = OTHER; note = 2'-O-methyl guanosine
  modified_base 34: mod_base = OTHER; note = 2'-O-methyl adenosine
  modified_base 35: mod_base = OTHER; note = 2'-O-methyl adenosine
  modified_base 36: mod_base = OTHER; note = 2'-O-methyl adenosine
  modified_base 37: mod_base = OTHER; note = 2'-O-methyl uridine
  modified_base 38: mod_base = OTHER; note = 2'-O-methyl adenosine
  modified_base 39: mod_base = OTHER; note = 2'-O-methyl guanosine
  modified_base 40: mod_base = OTHER; note = 2'-O-methyl cytidine
  modified_base 69: mod_base = OTHER; note = 2'-O-methyl adenosine
  modified_base 70: mod_base = OTHER; note = 2'-O-methyl cytidine
  modified_base 71: mod_base = OTHER; note = 2'-O-methyl uridine
  modified_base 72: mod_base = OTHER; note = 2'-O-methyl uridine
  modified_base 73: mod_base = OTHER; note = 2'-O-methyl guanosine
  modified_base 74: mod_base = OTHER; note = 2'-O-methyl adenosine
  modified_base 75: mod_base = OTHER; note = 2'-O-methyl adenosine
  modified_base 76: mod_base = OTHER; note = 2'-O-methyl adenosine
  modified_base 77: mod_base = OTHER; note = 2'-O-methyl adenosine
  modified_base 78: mod_base = OTHER; note = 2'-O-methyl adenosine
  modified_base 79: mod_base = OTHER; note = 2'-O-methyl guanosine
  modified_base 80: mod_base = OTHER; note = 2'-O-methyl uridine
  modified_base 81: mod_base = OTHER; note = 2'-O-methyl guanosine
  modified_base 82: mod_base = OTHER; note = 2'-O-methyl guanosine
  modified_base 83: mod_base = OTHER; note = 2'-O-methyl cytidine
  modified_base 84: mod_base = OTHER; note = 2'-O-methyl adenosine
  modified_base 85: mod_base = OTHER; note = 2'-O-methyl cytidine
  modified_base 86: mod_base = OTHER; note = 2'-O-methyl cytidine
  modified_base 87: mod_base = OTHER; note = 2'-O-methyl guanosine
  modified_base 88: mod_base = OTHER; note = 2'-O-methyl adenosine
  modified_base 89: mod_base = OTHER; note = 2'-O-methyl guanosine
  modified_base 90: mod_base = OTHER; note = 2'-O-methyl uridine
  modified_base 91: mod_base = OTHER; note = 2'-O-methyl cytidine
  modified_base 92: mod_base = OTHER; note = 2'-O-methyl guanosine
  modified_base 93: mod_base = OTHER; note = 2'-O-methyl guanosine
  modified_base 94: mod_base = OTHER; note = 2'-O-methyl uridine
  modified_base 95: mod_base = OTHER; note = 2'-O-methyl guanosine
  modified_base 96: mod_base = OTHER; note = 2'-O-methyl cytidine
  modified_base 125: mod_base = OTHER; note = guanosine phosphorothioate
  modified_base 126: mod_base = OTHER; note = 2'-O-methyl uridine phosphorothioate
  modified_base 127: mod_base = OTHER; note = 2'-O-methyl guanosine phosphorothioate
  modified_base 128: mod_base = OTHER; note = 2'-O-methyl cytidine
catggtgcacctgactcctggttttagagctagaaatagcaagttaaaataaggctagtccgttatcaacttgaaaaagtggcaccgagtcggtgctaacggcagacttttctgcgggagtcaggtgc

SEQ ID NO: 20897 - RNA, 128 nt, synthetic construct
  source 1..128: mol_type = other RNA
  modified_base 1: mod_base = OTHER; note = 2'-O-methyl cytidine phosphorothioate
  modified_base 2: mod_base = OTHER; note = 2'-O-methyl adenosine phosphorothioate
  modified_base 3: mod_base = OTHER; note = 2'-O-methyl uridine phosphorothioate
  modified_base 29: mod_base = OTHER; note = 2'-O-methyl guanosine
  modified_base 30: mod_base = OTHER; note = 2'-O-methyl cytidine
  modified_base 31: mod_base = OTHER; note = 2'-O-methyl uridine
  modified_base 32: mod_base = OTHER; note = 2'-O-methyl adenosine
  modified_base 33: mod_base = OTHER; note = 2'-O-methyl guanosine
  modified_base 34: mod_base = OTHER; note = 2'-O-methyl adenosine
  modified_base 35: mod_base = OTHER; note = 2'-O-methyl adenosine
  modified_base 36: mod_base = OTHER; note = 2'-O-methyl adenosine
  modified_base 37: mod_base = OTHER; note = 2'-O-methyl uridine
  modified_base 38: mod_base = OTHER; note = 2'-O-methyl adenosine
  modified_base 39: mod_base = OTHER; note = 2'-O-methyl guanosine
  modified_base 40: mod_base = OTHER; note = 2'-O-methyl cytidine
  modified_base 69: mod_base = OTHER; note = 2'-O-methyl adenosine
  modified_base 70: mod_base = OTHER; note = 2'-O-methyl cytidine
  modified_base 71: mod_base = OTHER; note = 2'-O-methyl uridine
  modified_base 72: mod_base = OTHER; note = 2'-O-methyl uridine
  modified_base 73: mod_base = OTHER; note = 2'-O-methyl guanosine
  modified_base 74: mod_base = OTHER; note = 2'-O-methyl adenosine
  modified_base 75: mod_base = OTHER; note = 2'-O-methyl adenosine
  modified_base 76: mod_base = OTHER; note = 2'-O-methyl adenosine
  modified_base 77: mod_base = OTHER; note = 2'-O-methyl adenosine
  modified_base 78: mod_base = OTHER; note = 2'-O-methyl adenosine
  modified_base 79: mod_base = OTHER; note = 2'-O-methyl guanosine
  modified_base 80: mod_base = OTHER; note = 2'-O-methyl uridine
  modified_base 81: mod_base = OTHER; note = 2'-O-methyl guanosine
  modified_base 82: mod_base = OTHER; note = 2'-O-methyl guanosine
  modified_base 83: mod_base = OTHER; note = 2'-O-methyl cytidine
  modified_base 84: mod_base = OTHER; note = 2'-O-methyl adenosine
  modified_base 85: mod_base = OTHER; note = 2'-O-methyl cytidine
  modified_base 86: mod_base = OTHER; note = 2'-O-methyl cytidine
  modified_base 87: mod_base = OTHER; note = 2'-O-methyl guanosine
  modified_base 88: mod_base = OTHER; note = 2'-O-methyl adenosine
  modified_base 89: mod_base = OTHER; note = 2'-O-methyl guanosine
  modified_base 90: mod_base = OTHER; note = 2'-O-methyl uridine
  modified_base 91: mod_base = OTHER; note = 2'-O-methyl cytidine
  modified_base 92: mod_base = OTHER; note = 2'-O-methyl guanosine
  modified_base 93: mod_base = OTHER; note = 2'-O-methyl guanosine
  modified_base 94: mod_base = OTHER; note = 2'-O-methyl uridine
  modified_base 95: mod_base = OTHER; note = 2'-O-methyl guanosine
  modified_base 96: mod_base = OTHER; note = 2'-O-methyl cytidine
  modified_base 125: mod_base = OTHER; note = guanosine phosphorothioate
  modified_base 126: mod_base = OTHER; note = 2'-O-methyl uridine phosphorothioate
  modified_base 127: mod_base = OTHER; note = 2'-O-methyl guanosine phosphorothioate
  modified_base 128: mod_base = OTHER; note = 2'-O-methyl cytidine
catggtgcacctgactcctggttttagagctagaaatagcaagttaaaataaggctagtccgttatcaacttgaaaaagtggcaccgagtcggtgctaacggcagacttttctgctggagtcaggtgc

SEQ ID NO: 20898 - RNA, 128 nt, synthetic construct
  source 1..128: mol_type = other RNA
  modified_base 1: mod_base = OTHER; note = 2'-O-methyl cytidine phosphorothioate
  modified_base 2: mod_base = OTHER; note = 2'-O-methyl adenosine phosphorothioate
  modified_base 3: mod_base = OTHER; note = 2'-O-methyl uridine phosphorothioate
  modified_base 29: mod_base = OTHER; note = 2'-O-methyl guanosine
  modified_base 30: mod_base = OTHER; note = 2'-O-methyl cytidine
  modified_base 31: mod_base = OTHER; note = 2'-O-methyl uridine
  modified_base 32: mod_base = OTHER; note = 2'-O-methyl adenosine
  modified_base 33: mod_base = OTHER; note = 2'-O-methyl guanosine
  modified_base 34: mod_base = OTHER; note = 2'-O-methyl adenosine
  modified_base 35: mod_base = OTHER; note = 2'-O-methyl adenosine
  modified_base 36: mod_base = OTHER; note = 2'-O-methyl adenosine
  modified_base 37: mod_base = OTHER; note = 2'-O-methyl uridine
  modified_base 38: mod_base = OTHER; note = 2'-O-methyl adenosine
  modified_base 39: mod_base = OTHER; note = 2'-O-methyl guanosine
  modified_base 40: mod_base = OTHER; note = 2'-O-methyl cytidine
  modified_base 69: mod_base = OTHER; note = 2'-O-methyl adenosine
  modified_base 70: mod_base = OTHER; note = 2'-O-methyl cytidine
  modified_base 71: mod_base = OTHER; note = 2'-O-methyl uridine
  modified_base 72: mod_base = OTHER; note = 2'-O-methyl uridine
  modified_base 73: mod_base = OTHER; note = 2'-O-methyl guanosine
  modified_base 74: mod_base = OTHER; note = 2'-O-methyl adenosine
  modified_base 75: mod_base = OTHER; note = 2'-O-methyl adenosine
  modified_base 76: mod_base = OTHER; note = 2'-O-methyl adenosine
  modified_base 77: mod_base = OTHER; note = 2'-O-methyl adenosine
  modified_base 78: mod_base = OTHER; note = 2'-O-methyl adenosine
  modified_base 79: mod_base = OTHER; note = 2'-O-methyl guanosine
  modified_base 80: mod_base = OTHER; note = 2'-O-methyl uridine
  modified_base 81: mod_base = OTHER; note = 2'-O-methyl guanosine
  modified_base 82: mod_base = OTHER; note = 2'-O-methyl guanosine
  modified_base 83: mod_base = OTHER; note = 2'-O-methyl cytidine
  modified_base 84: mod_base = OTHER; note = 2'-O-methyl adenosine
  modified_base 85: mod_base = OTHER; note = 2'-O-methyl cytidine
  modified_base 86: mod_base = OTHER; note = 2'-O-methyl cytidine
  modified_base 87: mod_base = OTHER; note = 2'-O-methyl guanosine
  modified_base 88: mod_base = OTHER; note = 2'-O-methyl adenosine
  modified_base 89: mod_base = OTHER; note = 2'-O-methyl guanosine
  modified_base 90: mod_base = OTHER; note = 2'-O-methyl uridine
  modified_base 91: mod_base = OTHER; note = 2'-O-methyl cytidine
  modified_base 92: mod_base = OTHER; note = 2'-O-methyl guanosine
  modified_base 93: mod_base = OTHER; note = 2'-O-methyl guanosine
  modified_base 94: mod_base = OTHER; note = 2'-O-methyl uridine
  modified_base 95: mod_base = OTHER; note = 2'-O-methyl guanosine
  modified_base 96: mod_base = OTHER; note = 2'-O-methyl cytidine
  modified_base 125: mod_base = OTHER; note = guanosine phosphorothioate
  modified_base 126: mod_base = OTHER; note = 2'-O-methyl uridine phosphorothioate
  modified_base 127: mod_base = OTHER; note = 2'-O-methyl guanosine phosphorothioate
  modified_base 128: mod_base = OTHER; note = 2'-O-methyl cytidine
catggtgcacctgactcctggttttagagctagaaatagcaagttaaaataaggctagtccgttatcaacttgaaaaagtggcaccgagtcggtgctaacggcagatttctctgccggagtcaggtgc

SEQ ID NO: 20899 - RNA, 128 nt, synthetic construct
  source 1..128: mol_type = other RNA
  modified_base 1: mod_base = OTHER; note = 2'-O-methyl cytidine phosphorothioate
  modified_base 2: mod_base = OTHER; note = 2'-O-methyl adenosine phosphorothioate
  modified_base 3: mod_base = OTHER; note = 2'-O-methyl uridine phosphorothioate
  modified_base 29: mod_base = OTHER; note = 2'-O-methyl guanosine
  modified_base 30: mod_base = OTHER; note = 2'-O-methyl cytidine
  modified_base 31: mod_base = OTHER; note = 2'-O-methyl uridine
  modified_base 32: mod_base = OTHER; note = 2'-O-methyl adenosine
  modified_base 33: mod_base = OTHER; note = 2'-O-methyl guanosine
  modified_base 34: mod_base = OTHER; note = 2'-O-methyl adenosine
  modified_base 35: mod_base = OTHER; note = 2'-O-methyl adenosine
  modified_base 36: mod_base = OTHER; note = 2'-O-methyl adenosine
  modified_base 37: mod_base = OTHER; note = 2'-O-methyl uridine
  modified_base 38: mod_base = OTHER; note = 2'-O-methyl adenosine
  modified_base 39: mod_base = OTHER; note = 2'-O-methyl guanosine
  modified_base 40: mod_base = OTHER; note = 2'-O-methyl cytidine
  modified_base 69: mod_base = OTHER; note = 2'-O-methyl adenosine
  modified_base 70: mod_base = OTHER; note = 2'-O-methyl cytidine
  modified_base 71: mod_base = OTHER; note = 2'-O-methyl uridine
  modified_base 72: mod_base = OTHER; note = 2'-O-methyl uridine
  modified_base 73: mod_base = OTHER; note = 2'-O-methyl guanosine
  modified_base 74: mod_base = OTHER; note = 2'-O-methyl adenosine
  modified_base 75: mod_base = OTHER; note = 2'-O-methyl adenosine
  modified_base 76: mod_base = OTHER; note = 2'-O-methyl adenosine
  modified_base 77: mod_base = OTHER; note = 2'-O-methyl adenosine
  modified_base 78: mod_base = OTHER; note = 2'-O-methyl adenosine
  modified_base 79: mod_base = OTHER; note = 2'-O-methyl guanosine
  modified_base 80: mod_base = OTHER; note = 2'-O-methyl uridine
  modified_base 81: mod_base = OTHER; note = 2'-O-methyl guanosine
  modified_base 82: mod_base = OTHER; note = 2'-O-methyl guanosine
  modified_base 83: mod_base = OTHER; note = 2'-O-methyl cytidine
  modified_base 84: mod_base = OTHER; note = 2'-O-methyl adenosine
  modified_base 85: mod_base = OTHER; note = 2'-O-methyl cytidine
  modified_base 86: mod_base = OTHER; note = 2'-O-methyl cytidine
  modified_base 87: mod_base = OTHER; note = 2'-O-methyl guanosine
  modified_base 88: mod_base = OTHER; note = 2'-O-methyl adenosine
  modified_base 89: mod_base = OTHER; note = 2'-O-methyl guanosine
  modified_base 90: mod_base = OTHER; note = 2'-O-methyl uridine
  modified_base 91: mod_base = OTHER; note = 2'-O-methyl cytidine
  modified_base 92: mod_base = OTHER; note = 2'-O-methyl guanosine
  modified_base 93: mod_base = OTHER; note = 2'-O-methyl guanosine
  modified_base 94: mod_base = OTHER; note = 2'-O-methyl uridine
  modified_base 95: mod_base = OTHER; note = 2'-O-methyl guanosine
  modified_base 96: mod_base = OTHER; note = 2'-O-methyl cytidine
  modified_base 125: mod_base = OTHER; note = guanosine phosphorothioate
  modified_base 126: mod_base = OTHER; note = 2'-O-methyl uridine phosphorothioate
  modified_base 127: mod_base = OTHER; note = 2'-O-methyl guanosine phosphorothioate
  modified_base 128: mod_base = OTHER; note = 2'-O-methyl cytidine
catggtgcacctgactcctggttttagagctagaaatagcaagttaaaataaggctagtccgttatcaacttgaaaaagtggcaccgagtcggtgctaacggcagatttctctgcgggagtcaggtgc

SEQ ID NO: 20900 - RNA, 128 nt, synthetic construct
  source 1..128: mol_type = other RNA
  modified_base 1: mod_base = OTHER; note = 2'-O-methyl cytidine phosphorothioate
  modified_base 2: mod_base = OTHER; note = 2'-O-methyl adenosine phosphorothioate
  modified_base 3: mod_base = OTHER; note = 2'-O-methyl uridine phosphorothioate
  modified_base 29: mod_base = OTHER; note = 2'-O-methyl guanosine
  modified_base 30: mod_base = OTHER; note = 2'-O-methyl cytidine
  modified_base 31: mod_base = OTHER; note = 2'-O-methyl uridine
  modified_base 32: mod_base = OTHER; note = 2'-O-methyl adenosine
  modified_base 33: mod_base = OTHER; note = 2'-O-methyl guanosine
  modified_base 34: mod_base = OTHER; note = 2'-O-methyl adenosine
  modified_base 35: mod_base = OTHER; note = 2'-O-methyl adenosine
  modified_base 36: mod_base = OTHER; note = 2'-O-methyl adenosine
  modified_base 37: mod_base = OTHER; note = 2'-O-methyl uridine
  modified_base 38: mod_base = OTHER; note = 2'-O-methyl adenosine
  modified_base 39: mod_base = OTHER; note = 2'-O-methyl guanosine
  modified_base 40: mod_base = OTHER; note = 2'-O-methyl cytidine
  modified_base 69: mod_base = OTHER; note = 2'-O-methyl adenosine
  modified_base 70: mod_base = OTHER; note = 2'-O-methyl cytidine
  modified_base 71: mod_base = OTHER; note = 2'-O-methyl uridine
  modified_base 72: mod_base = OTHER; note = 2'-O-methyl uridine
  modified_base 73: mod_base = OTHER; note = 2'-O-methyl guanosine
  modified_base 74: mod_base = OTHER; note = 2'-O-methyl adenosine
  modified_base 75: mod_base = OTHER; note = 2'-O-methyl adenosine
  modified_base 76: mod_base = OTHER; note = 2'-O-methyl adenosine
  modified_base 77: mod_base = OTHER; note = 2'-O-methyl adenosine
  modified_base 78: mod_base = OTHER; note = 2'-O-methyl adenosine
  modified_base 79: mod_base = OTHER; note = 2'-O-methyl guanosine
  modified_base 80: mod_base = OTHER; note = 2'-O-methyl uridine
  modified_base 81: mod_base = OTHER; note = 2'-O-methyl guanosine
  modified_base 82: mod_base = OTHER; note = 2'-O-methyl guanosine
  modified_base 83: mod_base = OTHER; note = 2'-O-methyl cytidine
  modified_base 84: mod_base = OTHER; note = 2'-O-methyl adenosine
  modified_base 85: mod_base = OTHER; note = 2'-O-methyl cytidine
  modified_base 86: mod_base = OTHER; note = 2'-O-methyl cytidine
  modified_base 87: mod_base = OTHER; note = 2'-O-methyl guanosine
  modified_base 88: mod_base = OTHER; note = 2'-O-methyl adenosine
  modified_base 89: mod_base = OTHER; note = 2'-O-methyl guanosine
  modified_base 90: mod_base = OTHER; note = 2'-O-methyl uridine
  modified_base 91: mod_base = OTHER; note = 2'-O-methyl cytidine
  modified_base 92: mod_base = OTHER; note = 2'-O-methyl guanosine
  modified_base 93: mod_base = OTHER; note = 2'-O-methyl guanosine
  modified_base 94: mod_base = OTHER; note = 2'-O-methyl uridine
  modified_base 95: mod_base = OTHER; note = 2'-O-methyl guanosine
  modified_base 96: mod_base = OTHER; note = 2'-O-methyl cytidine
  modified_base 125: mod_base = OTHER; note = guanosine phosphorothioate
  modified_base 126: mod_base = OTHER; note = 2'-O-methyl uridine phosphorothioate
  modified_base 127: mod_base = OTHER; note = 2'-O-methyl guanosine phosphorothioate
  modified_base 128: mod_base = OTHER; note = 2'-O-methyl cytidine
catggtgcacctgactcctggttttagagctagaaatagcaagttaaaataaggctagtccgttatcaacttgaaaaagtggcaccgagtcggtgctaacggcagatttctctgctggagtcaggtgc

SEQ ID NO: 20901 - RNA, 128 nt, synthetic construct
  source 1..128: mol_type = other RNA
  modified_base 1: mod_base = OTHER; note = 2'-O-methyl cytidine phosphorothioate
  modified_base 2: mod_base = OTHER; note = 2'-O-methyl adenosine phosphorothioate
  modified_base 3: mod_base = OTHER; note = 2'-O-methyl uridine phosphorothioate
  modified_base 29: mod_base = OTHER; note = 2'-O-methyl guanosine
  modified_base 30: mod_base = OTHER; note = 2'-O-methyl cytidine
  modified_base 31: mod_base = OTHER; note = 2'-O-methyl uridine
  modified_base 32: mod_base = OTHER; note = 2'-O-methyl adenosine
  modified_base 33: mod_base = OTHER; note = 2'-O-methyl guanosine
  modified_base 34: mod_base = OTHER; note = 2'-O-methyl adenosine
  modified_base 35: mod_base = OTHER; note = 2'-O-methyl adenosine
  modified_base 36: mod_base = OTHER; note = 2'-O-methyl adenosine
  modified_base 37: mod_base = OTHER; note = 2'-O-methyl uridine
  modified_base 38: mod_base = OTHER; note = 2'-O-methyl adenosine
  modified_base 39: mod_base = OTHER; note = 2'-O-methyl guanosine
  modified_base 40: mod_base = OTHER; note = 2'-O-methyl cytidine
  modified_base 69: mod_base = OTHER; note = 2'-O-methyl adenosine
  modified_base 70: mod_base = OTHER; note = 2'-O-methyl cytidine
  modified_base 71: mod_base = OTHER; note = 2'-O-methyl uridine
  modified_base 72: mod_base = OTHER; note = 2'-O-methyl uridine
  modified_base 73: mod_base = OTHER; note = 2'-O-methyl guanosine
  modified_base 74: mod_base = OTHER; note = 2'-O-methyl adenosine
  modified_base 75: mod_base = OTHER; note = 2'-O-methyl adenosine
  modified_base 76: mod_base = OTHER; note = 2'-O-methyl adenosine
  modified_base 77: mod_base = OTHER; note = 2'-O-methyl adenosine
  modified_base 78: mod_base = OTHER; note = 2'-O-methyl adenosine
  modified_base 79: mod_base = OTHER; note = 2'-O-methyl guanosine
  modified_base 80: mod_base = OTHER; note = 2'-O-methyl uridine
  modified_base 81: mod_base = OTHER; note = 2'-O-methyl guanosine
  modified_base 82: mod_base = OTHER; note = 2'-O-methyl guanosine
  modified_base 83: mod_base = OTHER; note = 2'-O-methyl cytidine
  modified_base 84: mod_base = OTHER; note = 2'-O-methyl adenosine
  modified_base 85: mod_base = OTHER; note = 2'-O-methyl cytidine
  modified_base 86: mod_base = OTHER; note = 2'-O-methyl cytidine
  modified_base 87: mod_base = OTHER; note = 2'-O-methyl guanosine
  modified_base 88: mod_base = OTHER; note = 2'-O-methyl adenosine
  modified_base 89: mod_base = OTHER; note = 2'-O-methyl guanosine
  modified_base 90: mod_base = OTHER; note = 2'-O-methyl uridine
  modified_base 91: mod_base = OTHER; note = 2'-O-methyl cytidine
  modified_base 92: mod_base = OTHER; note = 2'-O-methyl guanosine
  modified_base 93: mod_base = OTHER; note = 2'-O-methyl guanosine
  modified_base 94: mod_base = OTHER; note = 2'-O-methyl uridine
  modified_base 95: mod_base = OTHER; note = 2'-O-methyl guanosine
  modified_base 96: mod_base = OTHER; note = 2'-O-methyl cytidine
  modified_base 125: mod_base = OTHER; note = guanosine phosphorothioate
  modified_base 126: mod_base = OTHER; note = 2'-O-methyl uridine phosphorothioate
  modified_base 127: mod_base = OTHER; note = 2'-O-methyl guanosine phosphorothioate
  modified_base 128: mod_base = OTHER; note = 2'-O-methyl cytidine
catggtgcacctgactcctggttttagagctagaaatagcaagttaaaataaggctagtccgttatcaacttgaaaaagtggcaccgagtcggtgctaacggcagatttttctgcaggagtcaggtgc

SEQ ID NO: 20902 - RNA, 128 nt, synthetic construct
  source 1..128: mol_type = other RNA
  modified_base 1: mod_base = OTHER; note = 2'-O-methyl cytidine phosphorothioate
  modified_base 2: mod_base = OTHER; note = 2'-O-methyl adenosine phosphorothioate
  modified_base 3: mod_base = OTHER; note = 2'-O-methyl uridine phosphorothioate
  modified_base 29: mod_base = OTHER; note = 2'-O-methyl guanosine
  modified_base 30: mod_base = OTHER; note = 2'-O-methyl cytidine
  modified_base 31: mod_base = OTHER; note = 2'-O-methyl uridine
  modified_base 32: mod_base = OTHER; note = 2'-O-methyl adenosine
  modified_base 33: mod_base = OTHER; note = 2'-O-methyl guanosine
  modified_base 34: mod_base = OTHER; note = 2'-O-methyl adenosine
  modified_base 35: mod_base = OTHER; note = 2'-O-methyl adenosine
  modified_base 36: mod_base = OTHER; note = 2'-O-methyl adenosine
  modified_base 37: mod_base = OTHER; note = 2'-O-methyl uridine
  modified_base 38: mod_base = OTHER; note = 2'-O-methyl adenosine
  modified_base 39: mod_base = OTHER; note = 2'-O-methyl guanosine
  modified_base 40: mod_base = OTHER; note = 2'-O-methyl cytidine
  modified_base 69: mod_base = OTHER; note = 2'-O-methyl adenosine
  modified_base 70: mod_base = OTHER; note = 2'-O-methyl cytidine
  modified_base 71: mod_base = OTHER; note = 2'-O-methyl uridine
  modified_base 72: mod_base = OTHER; note = 2'-O-methyl uridine
  modified_base 73: mod_base = OTHER; note = 2'-O-methyl guanosine
  modified_base 74: mod_base = OTHER; note = 2'-O-methyl adenosine
  modified_base 75: mod_base = OTHER; note = 2'-O-methyl adenosine
  modified_base 76: mod_base = OTHER; note = 2'-O-methyl adenosine
  modified_base 77: mod_base = OTHER; note = 2'-O-methyl adenosine
  modified_base 78: mod_base = OTHER; note = 2'-O-methyl adenosine
  modified_base 79: mod_base = OTHER; note = 2'-O-methyl guanosine
  modified_base 80: mod_base = OTHER; note = 2'-O-methyl uridine
  modified_base 81: mod_base = OTHER; note = 2'-O-methyl guanosine
  modified_base 82: mod_base = OTHER; note = 2'-O-methyl guanosine
  modified_base 83: mod_base = OTHER; note = 2'-O-methyl cytidine
  modified_base 84: mod_base = OTHER; note = 2'-O-methyl adenosine
  modified_base 85: mod_base = OTHER; note = 2'-O-methyl cytidine
  modified_base 86: mod_base = OTHER; note = 2'-O-methyl cytidine
  modified_base 87: mod_base = OTHER; note = 2'-O-methyl guanosine
  modified_base 88: mod_base = OTHER; note = 2'-O-methyl adenosine
  modified_base 89: mod_base = OTHER; note = 2'-O-methyl guanosine
  modified_base 90: mod_base = OTHER; note = 2'-O-methyl uridine
  modified_base 91: mod_base = OTHER; note = 2'-O-methyl cytidine
  modified_base 92: mod_base = OTHER; note = 2'-O-methyl guanosine
  modified_base 93: mod_base = OTHER; note = 2'-O-methyl guanosine
  modified_base 94: mod_base = OTHER; note = 2'-O-methyl uridine
  modified_base 95: mod_base = OTHER; note = 2'-O-methyl guanosine
  modified_base 96: mod_base = OTHER; note = 2'-O-methyl cytidine
  modified_base 125: mod_base = OTHER; note = guanosine phosphorothioate
  modified_base 126: mod_base = OTHER; note = 2'-O-methyl uridine phosphorothioate
  modified_base 127: mod_base = OTHER; note = 2'-O-methyl guanosine phosphorothioate
  modified_base 128: mod_base = OTHER; note = 2'-O-methyl cytidine
catggtgcacctgactcctggttttagagctagaaatagcaagttaaaataaggctagtccgttatcaacttgaaaaagtggcaccgagtcggtgctaacggcagatttttctgccggagtcaggtgc

SEQ ID NO: 20903 - RNA, 128 nt, synthetic construct
  source 1..128: mol_type = other RNA
  modified_base 1: mod_base = OTHER; note = 2'-O-methyl cytidine phosphorothioate
  modified_base 2: mod_base = OTHER; note = 2'-O-methyl adenosine phosphorothioate
  modified_base 3: mod_base = OTHER; note = 2'-O-methyl uridine phosphorothioate
  modified_base 29: mod_base = OTHER; note = 2'-O-methyl guanosine
  modified_base 30: mod_base = OTHER; note = 2'-O-methyl cytidine
  modified_base 31: mod_base = OTHER; note = 2'-O-methyl uridine
  modified_base 32: mod_base = OTHER; note = 2'-O-methyl adenosine
  modified_base 33: mod_base = OTHER; note = 2'-O-methyl guanosine
  modified_base 34: mod_base = OTHER; note = 2'-O-methyl adenosine
  modified_base 35: mod_base = OTHER; note = 2'-O-methyl adenosine
  modified_base 36: mod_base = OTHER; note = 2'-O-methyl adenosine
  modified_base 37: mod_base = OTHER; note = 2'-O-methyl uridine
  modified_base 38: mod_base = OTHER; note = 2'-O-methyl adenosine
  modified_base 39: mod_base = OTHER; note = 2'-O-methyl guanosine
  modified_base 40: mod_base = OTHER; note = 2'-O-methyl cytidine
  modified_base 69: mod_base = OTHER; note = 2'-O-methyl adenosine
  modified_base 70: mod_base = OTHER; note = 2'-O-methyl cytidine
  modified_base 71: mod_base = OTHER; note = 2'-O-methyl uridine
  modified_base 72: mod_base = OTHER; note = 2'-O-methyl uridine
  modified_base 73: mod_base = OTHER; note = 2'-O-methyl guanosine
  modified_base 74: mod_base = OTHER; note = 2'-O-methyl adenosine
  modified_base 75: mod_base = OTHER; note = 2'-O-methyl adenosine
  modified_base 76: mod_base = OTHER; note = 2'-O-methyl adenosine
  modified_base 77: mod_base = OTHER; note = 2'-O-methyl adenosine
  modified_base 78: mod_base = OTHER; note = 2'-O-methyl adenosine
  modified_base 79: mod_base = OTHER; note = 2'-O-methyl guanosine
  modified_base 80: mod_base = OTHER; note = 2'-O-methyl uridine
  modified_base 81: mod_base = OTHER; note = 2'-O-methyl guanosine
  modified_base 82: mod_base = OTHER; note = 2'-O-methyl guanosine
  modified_base 83: mod_base = OTHER; note = 2'-O-methyl cytidine
  modified_base 84: mod_base = OTHER; note = 2'-O-methyl adenosine
  modified_base 85: mod_base = OTHER; note = 2'-O-methyl cytidine
  modified_base 86: mod_base = OTHER; note = 2'-O-methyl cytidine
  modified_base 87: mod_base = OTHER; note = 2'-O-methyl guanosine
  modified_base 88: mod_base = OTHER; note = 2'-O-methyl adenosine
  modified_base 89: mod_base = OTHER; note = 2'-O-methyl guanosine
  modified_base 90: mod_base = OTHER; note = 2'-O-methyl uridine
  modified_base 91: mod_base = OTHER; note = 2'-O-methyl cytidine
  modified_base 92: mod_base = OTHER; note = 2'-O-methyl guanosine
  modified_base 93: mod_base = OTHER; note = 2'-O-methyl guanosine
  modified_base 94: mod_base = OTHER; note = 2'-O-methyl uridine
  modified_base 95: mod_base = OTHER; note = 2'-O-methyl guanosine
  modified_base 96: mod_base = OTHER; note = 2'-O-methyl cytidine
  modified_base 125: mod_base = OTHER; note = guanosine phosphorothioate
  modified_base 126: mod_base = OTHER; note = 2'-O-methyl uridine phosphorothioate
  modified_base 127: mod_base = OTHER; note = 2'-O-methyl guanosine phosphorothioate
  modified_base 128: mod_base = OTHER; note = 2'-O-methyl cytidine
catggtgcacctgactcctggttttagagctagaaatagcaagttaaaataaggctagtccgttatcaacttgaaaaagtggcaccgagtcggtgctaacggcagatttttctgcgggagtcaggtgc

SEQ ID NO: 20904 - RNA, 128 nt, synthetic construct
  source 1..128: mol_type = other RNA
  modified_base 1: mod_base = OTHER; note = 2'-O-methyl cytidine phosphorothioate
  modified_base 2: mod_base = OTHER; note = 2'-O-methyl adenosine phosphorothioate
  modified_base 3: mod_base = OTHER; note = 2'-O-methyl uridine phosphorothioate
  modified_base 29: mod_base = OTHER; note = 2'-O-methyl guanosine
  modified_base 30: mod_base = OTHER; note = 2'-O-methyl cytidine
  modified_base 31: mod_base = OTHER; note = 2'-O-methyl uridine
  modified_base 32: mod_base = OTHER; note = 2'-O-methyl adenosine
  modified_base 33: mod_base = OTHER; note = 2'-O-methyl guanosine
  modified_base 34: mod_base = OTHER; note = 2'-O-methyl adenosine
  modified_base 35: mod_base = OTHER; note = 2'-O-methyl adenosine
  modified_base 36: mod_base = OTHER; note = 2'-O-methyl adenosine
  modified_base 37: mod_base = OTHER; note = 2'-O-methyl uridine
  modified_base 38: mod_base = OTHER; note = 2'-O-methyl adenosine
  modified_base 39: mod_base = OTHER; note = 2'-O-methyl guanosine
  modified_base 40: mod_base = OTHER; note = 2'-O-methyl cytidine
  modified_base 69: mod_base = OTHER; note = 2'-O-methyl adenosine
  modified_base 70: mod_base = OTHER; note = 2'-O-methyl cytidine
  modified_base 71: mod_base = OTHER; note = 2'-O-methyl uridine
  modified_base 72: mod_base = OTHER; note = 2'-O-methyl uridine
  modified_base 73: mod_base = OTHER; note = 2'-O-methyl guanosine
  modified_base 74: mod_base = OTHER; note = 2'-O-methyl adenosine
  modified_base 75: mod_base = OTHER; note = 2'-O-methyl adenosine
  modified_base 76: mod_base = OTHER; note = 2'-O-methyl adenosine
  modified_base 77: mod_base = OTHER; note = 2'-O-methyl adenosine
  modified_base 78: mod_base = OTHER; note = 2'-O-methyl adenosine
  modified_base 79: mod_base = OTHER; note = 2'-O-methyl guanosine
  modified_base 80: mod_base = OTHER; note = 2'-O-methyl uridine
  modified_base 81: mod_base = OTHER; note = 2'-O-methyl guanosine
  modified_base 82: mod_base = OTHER; note = 2'-O-methyl guanosine
  modified_base 83: mod_base = OTHER; note = 2'-O-methyl cytidine
  modified_base 84: mod_base = OTHER; note = 2'-O-methyl adenosine
  modified_base 85: mod_base = OTHER; note = 2'-O-methyl cytidine
  modified_base 86: mod_base = OTHER; note = 2'-O-methyl cytidine
  modified_base 87: mod_base = OTHER; note = 2'-O-methyl guanosine
  modified_base 88: mod_base = OTHER; note = 2'-O-methyl adenosine
  modified_base 89: mod_base = OTHER; note = 2'-O-methyl guanosine
  modified_base 90: mod_base = OTHER; note = 2'-O-methyl uridine
  modified_base 91: mod_base = OTHER; note = 2'-O-methyl cytidine
  modified_base 92: mod_base = OTHER; note = 2'-O-methyl guanosine
  modified_base 93: mod_base = OTHER; note = 2'-O-methyl guanosine
  modified_base 94: mod_base = OTHER; note = 2'-O-methyl uridine
  modified_base 95: mod_base = OTHER; note = 2'-O-methyl guanosine
  modified_base 96: mod_base = OTHER; note = 2'-O-methyl cytidine
  modified_base 125: mod_base = OTHER; note = guanosine phosphorothioate
  modified_base 126: mod_base = OTHER; note = 2'-O-methyl uridine phosphorothioate
  modified_base 127: mod_base = OTHER; note = 2'-O-methyl guanosine phosphorothioate
  modified_base 128: mod_base = OTHER; note = 2'-O-methyl cytidine
catggtgcacctgactcctggttttagagctagaaatagcaagttaaaataaggctagtccgttatcaacttgaaaaagtggcaccgagtcggtgctaacggcagatttttctgctggagtcaggtgc

SEQ ID NO: 20905 - RNA, 130 nt, synthetic construct
  source 1..130: mol_type = other RNA
  modified_base 1: mod_base = OTHER; note = 2'-O-methyl cytidine phosphorothioate
  modified_base 2: mod_base = OTHER; note = 2'-O-methyl adenosine phosphorothioate
  modified_base 3: mod_base = OTHER; note = 2'-O-methyl uridine phosphorothioate
  modified_base 29: mod_base = OTHER; note = 2'-O-methyl guanosine
  modified_base 30: mod_base = OTHER; note = 2'-O-methyl cytidine
  modified_base 31: mod_base = OTHER; note = 2'-O-methyl uridine
  modified_base 32: mod_base = OTHER; note = 2'-O-methyl adenosine
  modified_base 33: mod_base = OTHER; note = 2'-O-methyl guanosine
  modified_base 34: mod_base = OTHER; note = 2'-O-methyl adenosine
  modified_base 35: mod_base = OTHER; note = 2'-O-methyl adenosine
  modified_base 36: mod_base = OTHER; note = 2'-O-methyl adenosine
  modified_base 37: mod_base = OTHER; note = 2'-O-methyl uridine
  modified_base 38: mod_base = OTHER; note = 2'-O-methyl adenosine
  modified_base 39: mod_base = OTHER; note = 2'-O-methyl guanosine
  modified_base 40: mod_base = OTHER; note = 2'-O-methyl cytidine
  modified_base 69: mod_base = OTHER; note = 2'-O-methyl adenosine
  modified_base 70: mod_base = OTHER; note = 2'-O-methyl cytidine
  modified_base 71: mod_base = OTHER; note = 2'-O-methyl uridine
  modified_base 72: mod_base = OTHER; note = 2'-O-methyl uridine
  modified_base 73: mod_base = OTHER; note = 2'-O-methyl guanosine
  modified_base 74: mod_base = OTHER; note = 2'-O-methyl adenosine
  modified_base 75: mod_base = OTHER; note = 2'-O-methyl adenosine
  modified_base 76: mod_base = OTHER; note = 2'-O-methyl adenosine
  modified_base 77: mod_base = OTHER; note = 2'-O-methyl adenosine
  modified_base 78: mod_base = OTHER; note = 2'-O-methyl adenosine
  modified_base 79: mod_base = OTHER; note = 2'-O-methyl guanosine
  modified_base 80: mod_base = OTHER; note = 2'-O-methyl uridine
  modified_base 81: mod_base = OTHER; note = 2'-O-methyl guanosine
  modified_base 82: mod_base = OTHER; note = 2'-O-methyl guanosine
  modified_base 83: mod_base = OTHER; note = 2'-O-methyl cytidine
  modified_base 84: mod_base = OTHER; note = 2'-O-methyl adenosine
  modified_base 85: mod_base = OTHER; note = 2'-O-methyl cytidine
  modified_base 86: mod_base = OTHER; note = 2'-O-methyl cytidine
  modified_base 87: mod_base = OTHER; note = 2'-O-methyl guanosine
  modified_base 88: mod_base = OTHER; note = 2'-O-methyl adenosine
  modified_base 89: mod_base = OTHER; note = 2'-O-methyl guanosine
  modified_base 90: mod_base = OTHER; note = 2'-O-methyl uridine
  modified_base 91: mod_base = OTHER; note = 2'-O-methyl cytidine
  modified_base 92: mod_base = OTHER; note = 2'-O-methyl guanosine
  modified_base 93: mod_base = OTHER; note = 2'-O-methyl guanosine
  modified_base 94: mod_base = OTHER; note = 2'-O-methyl uridine
  modified_base 95: mod_base = OTHER; note = 2'-O-methyl guanosine
  modified_base 96: mod_base = OTHER; note = 2'-O-methyl cytidine
  modified_base 127: mod_base = OTHER; note = guanosine phosphorothioate
  modified_base 128: mod_base = OTHER; note = 2'-O-methyl uridine phosphorothioate
  modified_base 129: mod_base = OTHER; note = 2'-O-methyl guanosine phosphorothioate
  modified_base 130: mod_base = OTHER; note = 2'-O-methyl cytidine
catggtgcacctgactcctggttttagagctagaaatagcaagttaaaataaggctagtccgttatcaacttgaaaaagtggcaccgagtcggtgcagtaacggcagacttctctgcaggagtcaggtgc

SEQ ID NO: 20906 - RNA, 130 nt, synthetic construct
  source 1..130: mol_type = other RNA
  modified_base 1: mod_base = OTHER; note = 2'-O-methyl cytidine phosphorothioate
  modified_base 2: mod_base = OTHER; note = 2'-O-methyl adenosine phosphorothioate
  modified_base 3: mod_base = OTHER; note = 2'-O-methyl uridine phosphorothioate
  modified_base 29: mod_base = OTHER; note = 2'-O-methyl guanosine
  modified_base 30: mod_base = OTHER; note = 2'-O-methyl cytidine
  modified_base 31: mod_base = OTHER; note = 2'-O-methyl uridine
  modified_base 32: mod_base = OTHER; note = 2'-O-methyl adenosine
  modified_base 33: mod_base = OTHER; note = 2'-O-methyl guanosine
  modified_base 34: mod_base = OTHER; note = 2'-O-methyl adenosine
  modified_base 35: mod_base = OTHER; note = 2'-O-methyl adenosine
  modified_base 36: mod_base = OTHER; note = 2'-O-methyl adenosine
  modified_base 37: mod_base = OTHER; note = 2'-O-methyl uridine
  modified_base 38: mod_base = OTHER; note = 2'-O-methyl adenosine
  modified_base 39: mod_base = OTHER; note = 2'-O-methyl guanosine
  modified_base 40: mod_base = OTHER; note = 2'-O-methyl cytidine
  modified_base 69: mod_base = OTHER; note = 2'-O-methyl adenosine
  modified_base 70: mod_base = OTHER; note = 2'-O-methyl cytidine
  modified_base 71: mod_base = OTHER; note = 2'-O-methyl uridine
  modified_base 72: mod_base = OTHER; note = 2'-O-methyl uridine
  modified_base 73: mod_base = OTHER; note = 2'-O-methyl guanosine
  modified_base 74: mod_base = OTHER; note = 2'-O-methyl adenosine
  modified_base 75: mod_base = OTHER; note = 2'-O-methyl adenosine
  modified_base 76: mod_base = OTHER; note = 2'-O-methyl adenosine
  modified_base 77: mod_base = OTHER; note = 2'-O-methyl adenosine
  modified_base 78: mod_base = OTHER; note = 2'-O-methyl adenosine
  modified_base 79: mod_base = OTHER; note = 2'-O-methyl guanosine
  modified_base 80: mod_base = OTHER; note = 2'-O-methyl uridine
  modified_base 81: mod_base = OTHER; note = 2'-O-methyl guanosine
  modified_base 82: mod_base = OTHER; note = 2'-O-methyl guanosine
  modified_base 83: mod_base = OTHER; note = 2'-O-methyl cytidine
  modified_base 84: mod_base = OTHER; note = 2'-O-methyl adenosine
  modified_base 85: mod_base = OTHER; note = 2'-O-methyl cytidine
  modified_base 86: mod_base = OTHER; note = 2'-O-methyl cytidine
  modified_base 87: mod_base = OTHER; note = 2'-O-methyl guanosine
  modified_base 88: mod_base = OTHER; note = 2'-O-methyl adenosine
  modified_base 89: mod_base = OTHER; note = 2'-O-methyl guanosine
  modified_base 90: mod_base = OTHER; note = 2'-O-methyl uridine
  modified_base 91: mod_base = OTHER; note = 2'-O-methyl cytidine
  modified_base 92: mod_base = OTHER; note = 2'-O-methyl guanosine
  modified_base 93: mod_base = OTHER; note = 2'-O-methyl guanosine
  modified_base 94: mod_base = OTHER; note = 2'-O-methyl uridine
  modified_base 95: mod_base = OTHER; note = 2'-O-methyl guanosine
  modified_base 96: mod_base = OTHER; note = 2'-O-methyl cytidine
  modified_base 127: mod_base = OTHER; note = guanosine phosphorothioate
  modified_base 128: mod_base = OTHER; note = 2'-O-methyl uridine phosphorothioate
  modified_base 129: mod_base = OTHER; note = 2'-O-methyl guanosine phosphorothioate
  modified_base 130: mod_base = OTHER; note = 2'-O-methyl cytidine
catggtgcacctgactcctggttttagagctagaaatagcaagttaaaataaggctagtccgttatcaacttgaaaaagtggcaccgagtcggtgcagtaacggcagacttctctgccggagtcaggtgc

SEQ ID NO: 20907 - RNA, 130 nt, synthetic construct
  source 1..130: mol_type = other RNA
  modified_base 1: mod_base = OTHER; note = 2'-O-methyl cytidine phosphorothioate
  modified_base 2: mod_base = OTHER; note = 2'-O-methyl adenosine phosphorothioate
  modified_base 3: mod_base = OTHER; note = 2'-O-methyl uridine phosphorothioate
  modified_base 29: mod_base = OTHER; note = 2'-O-methyl guanosine
  modified_base 30: mod_base = OTHER; note = 2'-O-methyl cytidine
  modified_base 31: mod_base = OTHER; note = 2'-O-methyl uridine
  modified_base 32: mod_base = OTHER; note = 2'-O-methyl adenosine
  modified_base 33: mod_base = OTHER; note = 2'-O-methyl guanosine
  modified_base 34: mod_base = OTHER; note = 2'-O-methyl adenosine
  modified_base 35: mod_base = OTHER; note = 2'-O-methyl adenosine
  modified_base 36: mod_base = OTHER; note = 2'-O-methyl adenosine
  modified_base 37: mod_base = OTHER; note = 2'-O-methyl uridine
  modified_base 38: mod_base = OTHER; note = 2'-O-methyl adenosine
  modified_base 39: mod_base = OTHER; note = 2'-O-methyl guanosine
  modified_base 40: mod_base = OTHER; note = 2'-O-methyl cytidine
  modified_base 69: mod_base = OTHER; note = 2'-O-methyl adenosine
  modified_base 70: mod_base = OTHER; note = 2'-O-methyl cytidine
  modified_base 71: mod_base = OTHER; note = 2'-O-methyl uridine
  modified_base 72: mod_base = OTHER; note = 2'-O-methyl uridine
  modified_base 73: mod_base = OTHER; note = 2'-O-methyl guanosine
  modified_base 74: mod_base = OTHER; note = 2'-O-methyl adenosine
  modified_base 75: mod_base = OTHER; note = 2'-O-methyl adenosine
  modified_base 76: mod_base = OTHER; note = 2'-O-methyl adenosine
  modified_base 77: mod_base = OTHER; note = 2'-O-methyl adenosine
  modified_base 78: mod_base = OTHER; note = 2'-O-methyl adenosine
  modified_base 79: mod_base = OTHER; note = 2'-O-methyl guanosine
  modified_base 80: mod_base = OTHER; note = 2'-O-methyl uridine
  modified_base 81: mod_base = OTHER; note = 2'-O-methyl guanosine
  modified_base 82: mod_base = OTHER; note = 2'-O-methyl guanosine
  modified_base 83: mod_base = OTHER; note = 2'-O-methyl cytidine
  modified_base 84: mod_base = OTHER; note = 2'-O-methyl adenosine
  modified_base 85: mod_base = OTHER; note = 2'-O-methyl cytidine
  modified_base 86: mod_base = OTHER; note = 2'-O-methyl cytidine
  modified_base 87: mod_base = OTHER; note = 2'-O-methyl guanosine
  modified_base 88: mod_base = OTHER; note = 2'-O-methyl adenosine
  modified_base 89: mod_base = OTHER; note = 2'-O-methyl guanosine
  modified_base 90: mod_base = OTHER; note = 2'-O-methyl uridine
  modified_base 91: mod_base = OTHER; note = 2'-O-methyl cytidine
  modified_base 92: mod_base = OTHER; note = 2'-O-methyl guanosine
  modified_base 93: mod_base = OTHER; note = 2'-O-methyl guanosine
  modified_base 94: mod_base = OTHER; note = 2'-O-methyl uridine
  modified_base 95: mod_base = OTHER; note = 2'-O-methyl guanosine
  modified_base 96: mod_base = OTHER; note = 2'-O-methyl cytidine
  modified_base 127: mod_base = OTHER; note = guanosine phosphorothioate
  modified_base 128: mod_base = OTHER; note = 2'-O-methyl uridine phosphorothioate
  modified_base 129: mod_base = OTHER; note = 2'-O-methyl guanosine phosphorothioate
  modified_base 130: mod_base = OTHER; note = 2'-O-methyl cytidine
catggtgcacctgactcctggttttagagctagaaatagcaagttaaaataaggctagtccgttatcaacttgaaaaagtggcaccgagtcggtgcagtaacggcagacttctctgcgggagtcaggtgc

SEQ ID NO: 20908 - RNA, 130 nt, synthetic construct
  source 1..130: mol_type = other RNA
  modified_base 1: mod_base = OTHER; note = 2'-O-methyl cytidine phosphorothioate
  modified_base 2: mod_base = OTHER; note = 2'-O-methyl adenosine phosphorothioate
  modified_base 3: mod_base = OTHER; note = 2'-O-methyl uridine phosphorothioate
  modified_base 29: mod_base = OTHER; note = 2'-O-methyl guanosine
  modified_base 30: mod_base = OTHER; note = 2'-O-methyl cytidine
  modified_base 31: mod_base = OTHER; note = 2'-O-methyl uridine
  modified_base 32: mod_base = OTHER; note = 2'-O-methyl adenosine
  modified_base 33: mod_base = OTHER; note = 2'-O-methyl guanosine
  modified_base 34: mod_base = OTHER; note = 2'-O-methyl adenosine
  modified_base 35: mod_base = OTHER; note = 2'-O-methyl adenosine
  modified_base 36: mod_base = OTHER; note = 2'-O-methyl adenosine
  modified_base 37: mod_base = OTHER; note = 2'-O-methyl uridine
  modified_base 38: mod_base = OTHER; note = 2'-O-methyl adenosine
  modified_base 39: mod_base = OTHER; note = 2'-O-methyl guanosine
  modified_base 40: mod_base = OTHER; note = 2'-O-methyl cytidine
  modified_base 69: mod_base = OTHER; note = 2'-O-methyl adenosine
  modified_base 70: mod_base = OTHER; note = 2'-O-methyl cytidine
  modified_base 71: mod_base = OTHER; note = 2'-O-methyl uridine
  modified_base 72: mod_base = OTHER; note = 2'-O-methyl uridine
  modified_base 73: mod_base = OTHER; note = 2'-O-methyl guanosine
  modified_base 74: mod_base = OTHER; note = 2'-O-methyl adenosine
  modified_base 75: mod_base = OTHER; note = 2'-O-methyl adenosine
  modified_base 76: mod_base = OTHER; note = 2'-O-methyl adenosine
  modified_base 77: mod_base = OTHER; note = 2'-O-methyl adenosine
  modified_base 78: mod_base = OTHER; note = 2'-O-methyl adenosine
  modified_base 79: mod_base = OTHER; note = 2'-O-methyl guanosine
  modified_base 80: mod_base = OTHER; note = 2'-O-methyl uridine
  modified_base 81: mod_base = OTHER; note = 2'-O-methyl guanosine
  modified_base 82: mod_base = OTHER; note = 2'-O-methyl guanosine
  modified_base 83: mod_base = OTHER; note = 2'-O-methyl cytidine
  modified_base 84: mod_base = OTHER; note = 2'-O-methyl adenosine
  modified_base 85: mod_base = OTHER; note = 2'-O-methyl cytidine
  modified_base 86: mod_base = OTHER; note = 2'-O-methyl cytidine
  modified_base 87: mod_base = OTHER; note = 2'-O-methyl guanosine
  modified_base 88: mod_base = OTHER; note = 2'-O-methyl adenosine
  modified_base 89: mod_base = OTHER; note = 2'-O-methyl guanosine
  modified_base 90: mod_base = OTHER; note = 2'-O-methyl uridine
  modified_base 91: mod_base = OTHER; note = 2'-O-methyl cytidine
  modified_base 92: mod_base = OTHER; note = 2'-O-methyl guanosine
  modified_base 93: mod_base = OTHER; note = 2'-O-methyl guanosine
  modified_base 94: mod_base = OTHER; note = 2'-O-methyl uridine
  modified_base 95: mod_base = OTHER; note = 2'-O-methyl guanosine
  modified_base 96: mod_base = OTHER; note = 2'-O-methyl cytidine
  modified_base 127: mod_base = OTHER; note = guanosine phosphorothioate
  modified_base 128: mod_base = OTHER; note = 2'-O-methyl uridine phosphorothioate
  modified_base 129: mod_base = OTHER; note = 2'-O-methyl guanosine phosphorothioate
  modified_base 130: mod_base = OTHER; note = 2'-O-methyl cytidine
catggtgcacctgactcctggttttagagctagaaatagcaagttaaaataaggctagtccgttatcaacttgaaaaagtggcaccgagtcggtgcagtaacggcagacttctctgctggagtcaggtgc

SEQ ID NO: 20909 - RNA, 130 nt, synthetic construct
  source 1..130: mol_type = other RNA
  modified_base 1: mod_base = OTHER; note = 2'-O-methyl cytidine phosphorothioate
  modified_base 2: mod_base = OTHER; note = 2'-O-methyl adenosine phosphorothioate
  modified_base 3: mod_base = OTHER; note = 2'-O-methyl uridine phosphorothioate
  modified_base 29: mod_base = OTHER; note = 2'-O-methyl guanosine
  modified_base 30: mod_base = OTHER; note = 2'-O-methyl cytidine
  modified_base 31: mod_base = OTHER; note = 2'-O-methyl uridine
  modified_base 32: mod_base = OTHER; note = 2'-O-methyl adenosine
  modified_base 33: mod_base = OTHER; note = 2'-O-methyl guanosine
  modified_base 34: mod_base = OTHER; note = 2'-O-methyl adenosine
  modified_base 35: mod_base = OTHER; note = 2'-O-methyl adenosine
  modified_base 36: mod_base = OTHER; note = 2'-O-methyl adenosine
  modified_base 37: mod_base = OTHER; note = 2'-O-methyl uridine
  modified_base 38: mod_base = OTHER; note = 2'-O-methyl adenosine
  modified_base 39: mod_base = OTHER; note = 2'-O-methyl guanosine
  modified_base 40: mod_base = OTHER; note = 2'-O-methyl cytidine
  modified_base 69: mod_base = OTHER; note = 2'-O-methyl adenosine
  modified_base 70: mod_base = OTHER; note = 2'-O-methyl cytidine
  modified_base 71: mod_base = OTHER; note = 2'-O-methyl uridine
  modified_base 72: mod_base = OTHER; note = 2'-O-methyl uridine
  modified_base 73: mod_base = OTHER; note = 2'-O-methyl guanosine
  modified_base 74: mod_base = OTHER; note = 2'-O-methyl adenosine
  modified_base 75: mod_base = OTHER; note = 2'-O-methyl adenosine
  modified_base 76: mod_base = OTHER; note = 2'-O-methyl adenosine
  modified_base 77: mod_base = OTHER; note = 2'-O-methyl adenosine
  modified_base 78: mod_base = OTHER; note = 2'-O-methyl adenosine
  modified_base 79: mod_base = OTHER; note = 2'-O-methyl guanosine
  modified_base 80: mod_base = OTHER; note = 2'-O-methyl uridine
  modified_base 81: mod_base = OTHER; note = 2'-O-methyl guanosine
  modified_base 82: mod_base = OTHER; note = 2'-O-methyl guanosine
  modified_base 83: mod_base = OTHER; note = 2'-O-methyl cytidine
  modified_base 84: mod_base = OTHER; note = 2'-O-methyl adenosine
  modified_base 85: mod_base = OTHER; note = 2'-O-methyl cytidine
  modified_base 86: mod_base = OTHER; note = 2'-O-methyl cytidine
  modified_base 87: mod_base = OTHER; note = 2'-O-methyl guanosine
  modified_base 88: mod_base = OTHER; note = 2'-O-methyl adenosine
  modified_base 89: mod_base = OTHER; note = 2'-O-methyl guanosine
  modified_base 90: mod_base = OTHER; note = 2'-O-methyl uridine
  modified_base 91: mod_base = OTHER; note = 2'-O-methyl cytidine
  modified_base 92: mod_base = OTHER; note = 2'-O-methyl guanosine
  modified_base 93: mod_base = OTHER; note = 2'-O-methyl guanosine
  modified_base 94: mod_base = OTHER; note = 2'-O-methyl uridine
  modified_base 95: mod_base = OTHER; note = 2'-O-methyl guanosine
  modified_base 96: mod_base = OTHER; note = 2'-O-methyl cytidine
  modified_base 127: mod_base = OTHER; note = guanosine phosphorothioate
  modified_base 128: mod_base = OTHER; note = 2'-O-methyl uridine phosphorothioate
  modified_base 129: mod_base = OTHER; note = 2'-O-methyl guanosine phosphorothioate
  modified_base 130: mod_base = OTHER; note = 2'-O-methyl cytidine
catggtgcacctgactcctggttttagagctagaaatagcaagttaaaataaggctagtccgttatcaacttgaaaaagtggcaccgagtcggtgcagtaacggcagatttctctgcaggagtcaggtgc

SEQ ID NO: 20910 - RNA, 130 nt, synthetic construct
  source 1..130: mol_type = other RNA
  modified_base 1: mod_base = OTHER; note = 2'-O-methyl cytidine phosphorothioate
  modified_base 2: mod_base = OTHER; note = 2'-O-methyl adenosine phosphorothioate
  modified_base 3: mod_base = OTHER; note = 2'-O-methyl uridine phosphorothioate
  modified_base 29: mod_base = OTHER; note = 2'-O-methyl guanosine
  modified_base 30: mod_base = OTHER; note = 2'-O-methyl cytidine
  modified_base 31: mod_base = OTHER; note = 2'-O-methyl uridine
  modified_base 32: mod_base = OTHER; note = 2'-O-methyl adenosine
  modified_base 33: mod_base = OTHER; note = 2'-O-methyl guanosine
  modified_base 34: mod_base = OTHER; note = 2'-O-methyl adenosine
  modified_base 35: mod_base = OTHER; note = 2'-O-methyl adenosine
  modified_base 36: mod_base = OTHER; note = 2'-O-methyl adenosine
  modified_base 37: mod_base = OTHER; note = 2'-O-methyl uridine
  modified_base 38: mod_base = OTHER; note = 2'-O-methyl adenosine
  modified_base 39: mod_base = OTHER; note = 2'-O-methyl guanosine
  modified_base 40: mod_base = OTHER; note = 2'-O-methyl cytidine
  modified_base 69: mod_base = OTHER; note = 2'-O-methyl adenosine
  modified_base 70: mod_base = OTHER; note = 2'-O-methyl cytidine
  modified_base 71: mod_base = OTHER; note = 2'-O-methyl uridine
  modified_base 72: mod_base = OTHER; note = 2'-O-methyl uridine
  modified_base 73: mod_base = OTHER; note = 2'-O-methyl guanosine
  modified_base 74: mod_base = OTHER; note = 2'-O-methyl adenosine
  modified_base 75: mod_base = OTHER; note = 2'-O-methyl adenosine
  modified_base 76: mod_base = OTHER; note = 2'-O-methyl adenosine
  modified_base 77: mod_base = OTHER; note = 2'-O-methyl adenosine
  modified_base 78: mod_base = OTHER; note = 2'-O-methyl adenosine
  modified_base 79: mod_base = OTHER; note = 2'-O-methyl guanosine
  modified_base 80: mod_base = OTHER; note = 2'-O-methyl uridine
  modified_base 81: mod_base = OTHER; note = 2'-O-methyl guanosine
  modified_base 82: mod_base = OTHER; note = 2'-O-methyl guanosine
  modified_base 83: mod_base = OTHER; note = 2'-O-methyl cytidine
  modified_base 84: mod_base = OTHER; note = 2'-O-methyl adenosine
  modified_base 85: mod_base = OTHER; note = 2'-O-methyl cytidine
  modified_base 86: mod_base = OTHER; note = 2'-O-methyl cytidine
  modified_base 87: mod_base = OTHER; note = 2'-O-methyl guanosine
  modified_base 88: mod_base = OTHER; note = 2'-O-methyl adenosine
  modified_base 89: mod_base = OTHER; note = 2'-O-methyl guanosine
  modified_base 90: mod_base = OTHER; note = 2'-O-methyl uridine
  modified_base 91: mod_base = OTHER; note = 2'-O-methyl cytidine
  modified_base 92: mod_base = OTHER; note = 2'-O-methyl guanosine
  modified_base 93: mod_base = OTHER; note = 2'-O-methyl guanosine
  modified_base 94: mod_base = OTHER; note = 2'-O-methyl uridine
  modified_base 95: mod_base = OTHER; note = 2'-O-methyl guanosine
  modified_base 96: mod_base = OTHER; note = 2'-O-methyl cytidine
  modified_base 127: mod_base = OTHER; note = guanosine phosphorothioate
  modified_base 128: mod_base = OTHER; note = 2'-O-methyl uridine phosphorothioate
  modified_base 129: mod_base = OTHER; note = 2'-O-methyl guanosine phosphorothioate
  modified_base 130: mod_base = OTHER; note = 2'-O-methyl cytidine
catggtgcacctgactcctggttttagagctagaaatagcaagttaaaataaggctagtccgttatcaacttgaaaaagtggcaccgagtcggtgcagtaacggcagacttttctgcaggagtcaggtgc

SEQ ID NO: 20911 - RNA, 130 nt, synthetic construct
  source 1..130: mol_type = other RNA
  modified_base 1: mod_base = OTHER; note = 2'-O-methyl cytidine phosphorothioate
  modified_base 2: mod_base = OTHER; note = 2'-O-methyl adenosine phosphorothioate
  modified_base 3: mod_base = OTHER; note = 2'-O-methyl uridine phosphorothioate
  modified_base 29: mod_base = OTHER; note = 2'-O-methyl guanosine
  modified_base 30: mod_base = OTHER; note = 2'-O-methyl cytidine
  modified_base 31: mod_base = OTHER; note = 2'-O-methyl uridine
  modified_base 32: mod_base = OTHER; note = 2'-O-methyl adenosine
  modified_base 33: mod_base = OTHER; note = 2'-O-methyl guanosine
  modified_base 34: mod_base = OTHER; note = 2'-O-methyl adenosine
  modified_base 35: mod_base = OTHER; note = 2'-O-methyl adenosine
  modified_base 36: mod_base = OTHER; note = 2'-O-methyl adenosine
  modified_base 37: mod_base = OTHER; note = 2'-O-methyl uridine
  modified_base 38: mod_base = OTHER; note = 2'-O-methyl adenosine
  modified_base 39: mod_base = OTHER; note = 2'-O-methyl guanosine
  modified_base 40: mod_base = OTHER; note = 2'-O-methyl cytidine
  modified_base 69: mod_base = OTHER; note = 2'-O-methyl adenosine
  modified_base 70: mod_base = OTHER; note = 2'-O-methyl cytidine
  modified_base 71: mod_base = OTHER; note = 2'-O-methyl uridine
  modified_base 72: mod_base = OTHER; note = 2'-O-methyl uridine
  modified_base 73: mod_base = OTHER; note = 2'-O-methyl guanosine
  modified_base 74: mod_base = OTHER; note = 2'-O-methyl adenosine
  modified_base 75: mod_base = OTHER; note = 2'-O-methyl adenosine
  modified_base 76: mod_base = OTHER; note = 2'-O-methyl adenosine
  modified_base 77: mod_base = OTHER; note = 2'-O-methyl adenosine
  modified_base 78: mod_base = OTHER; note = 2'-O-methyl adenosine
  modified_base 79: mod_base = OTHER; note = 2'-O-methyl guanosine
  modified_base 80: mod_base = OTHER; note = 2'-O-methyl uridine
  modified_base 81: mod_base = OTHER; note = 2'-O-methyl guanosine
  modified_base 82: mod_base = OTHER; note = 2'-O-methyl guanosine
  modified_base 83: mod_base = OTHER; note = 2'-O-methyl cytidine
  modified_base 84: mod_base = OTHER; note = 2'-O-methyl adenosine
  modified_base 85: mod_base = OTHER; note = 2'-O-methyl cytidine
  modified_base 86: mod_base = OTHER; note = 2'-O-methyl cytidine
  modified_base 87: mod_base = OTHER; note = 2'-O-methyl guanosine
  modified_base 88: mod_base = OTHER; note = 2'-O-methyl adenosine
  modified_base 89: mod_base = OTHER; note = 2'-O-methyl guanosine
  modified_base 90: mod_base = OTHER; note = 2'-O-methyl uridine
  modified_base 91: mod_base = OTHER; note = 2'-O-methyl cytidine
  modified_base 92: mod_base = OTHER; note = 2'-O-methyl guanosine
  modified_base 93: mod_base = OTHER; note = 2'-O-methyl guanosine
  modified_base 94: mod_base = OTHER; note = 2'-O-methyl uridine
  modified_base 95: mod_base = OTHER; note = 2'-O-methyl guanosine
  modified_base 96: mod_base = OTHER; note = 2'-O-methyl cytidine
  modified_base 127: mod_base = OTHER; note = guanosine phosphorothioate
  modified_base 128: mod_base = OTHER; note = 2'-O-methyl uridine phosphorothioate
  modified_base 129: mod_base = OTHER; note = 2'-O-methyl guanosine phosphorothioate
  modified_base 130: mod_base = OTHER; note = 2'-O-methyl cytidine
catggtgcacctgactcctggttttagagctagaaatagcaagttaaaataaggctagtccgttatcaacttgaaaaagtggcaccgagtcggtgcagtaacggcagacttttctgccggagtcaggtgc

SEQ ID NO: 20912 - RNA, 130 nt, synthetic construct
  source 1..130: mol_type = other RNA
  modified_base 1: mod_base = OTHER; note = 2'-O-methyl cytidine phosphorothioate
  modified_base 2: mod_base = OTHER; note = 2'-O-methyl adenosine phosphorothioate
  modified_base 3: mod_base = OTHER; note = 2'-O-methyl uridine phosphorothioate
  modified_base 29: mod_base = OTHER; note = 2'-O-methyl guanosine
  modified_base 30: mod_base = OTHER; note = 2'-O-methyl cytidine
  modified_base 31: mod_base = OTHER; note = 2'-O-methyl uridine
  modified_base 32: mod_base = OTHER; note = 2'-O-methyl adenosine
  modified_base 33: mod_base = OTHER; note = 2'-O-methyl guanosine
  modified_base 34: mod_base = OTHER; note = 2'-O-methyl adenosine
  modified_base 35: mod_base = OTHER; note = 2'-O-methyl adenosine
  modified_base 36: mod_base = OTHER; note = 2'-O-methyl adenosine
  modified_base 37: mod_base = OTHER; note = 2'-O-methyl uridine
  modified_base 38: mod_base = OTHER; note = 2'-O-methyl adenosine
  modified_base 39: mod_base = OTHER; note = 2'-O-methyl guanosine
  modified_base 40: mod_base = OTHER; note = 2'-O-methyl cytidine
  modified_base 69: mod_base = OTHER; note = 2'-O-methyl adenosine
  modified_base 70: mod_base = OTHER; note = 2'-O-methyl cytidine
  modified_base 71: mod_base = OTHER; note = 2'-O-methyl uridine
  modified_base 72: mod_base = OTHER; note = 2'-O-methyl uridine
  modified_base 73: mod_base = OTHER; note = 2'-O-methyl guanosine
  modified_base 74: mod_base = OTHER; note = 2'-O-methyl adenosine
  modified_base 75: mod_base = OTHER; note = 2'-O-methyl adenosine
  modified_base 76: mod_base = OTHER; note = 2'-O-methyl adenosine
  modified_base 77: mod_base = OTHER; note = 2'-O-methyl adenosine
  modified_base 78: mod_base = OTHER; note = 2'-O-methyl adenosine
  modified_base 79: mod_base = OTHER; note = 2'-O-methyl guanosine
  modified_base 80: mod_base = OTHER; note = 2'-O-methyl uridine
  modified_base 81: mod_base = OTHER; note = 2'-O-methyl guanosine
  modified_base 82: mod_base = OTHER; note = 2'-O-methyl guanosine
  modified_base 83: mod_base = OTHER; note = 2'-O-methyl cytidine
  modified_base 84: mod_base = OTHER; note = 2'-O-methyl adenosine
  modified_base 85: mod_base = OTHER; note = 2'-O-methyl cytidine
  modified_base 86: mod_base = OTHER; note = 2'-O-methyl cytidine
  modified_base 87: mod_base = OTHER; note = 2'-O-methyl guanosine
  modified_base 88: mod_base = OTHER; note = 2'-O-methyl adenosine
  modified_base 89: mod_base = OTHER; note = 2'-O-methyl guanosine
  modified_base 90: mod_base = OTHER; note = 2'-O-methyl uridine
  modified_base 91: mod_base = OTHER; note = 2'-O-methyl cytidine
  modified_base 92: mod_base = OTHER; note = 2'-O-methyl guanosine
  modified_base 93: mod_base = OTHER; note = 2'-O-methyl guanosine
  modified_base 94: mod_base = OTHER; note = 2'-O-methyl uridine
  modified_base 95: mod_base = OTHER; note = 2'-O-methyl guanosine
  modified_base 96: mod_base = OTHER; note = 2'-O-methyl cytidine
  modified_base 127: mod_base = OTHER; note = guanosine phosphorothioate
  modified_base 128: mod_base = OTHER; note = 2'-O-methyl uridine phosphorothioate
  modified_base 129: mod_base = OTHER; note = 2'-O-methyl guanosine phosphorothioate
  modified_base 130: mod_base = OTHER; note = 2'-O-methyl cytidine
catggtgcacctgactcctggttttagagctagaaatagcaagttaaaataaggctagtccgttatcaacttgaaaaagtggcaccgagtcggtgcagtaacggcagacttttctgcgggagtcaggtgc

SEQ ID NO: 20913 - RNA, 130 nt, synthetic construct
  source 1..130: mol_type = other RNA
  modified_base 1: mod_base = OTHER; note = 2'-O-methyl cytidine phosphorothioate
  modified_base 2: mod_base = OTHER; note = 2'-O-methyl adenosine phosphorothioate
  modified_base 3: mod_base = OTHER; note = 2'-O-methyl uridine phosphorothioate
  modified_base 29: mod_base = OTHER; note = 2'-O-methyl guanosine
  modified_base 30: mod_base = OTHER; note = 2'-O-methyl cytidine
  modified_base 31: mod_base = OTHER; note = 2'-O-methyl uridine
  modified_base 32: mod_base = OTHER; note = 2'-O-methyl adenosine
  modified_base 33: mod_base = OTHER; note = 2'-O-methyl guanosine
  modified_base 34: mod_base = OTHER; note = 2'-O-methyl adenosine
  modified_base 35: mod_base = OTHER; note = 2'-O-methyl adenosine
  modified_base 36: mod_base = OTHER; note = 2'-O-methyl adenosine
  modified_base 37: mod_base = OTHER; note = 2'-O-methyl uridine
  modified_base 38: mod_base = OTHER; note = 2'-O-methyl adenosine
  modified_base 39: mod_base = OTHER; note = 2'-O-methyl guanosine
  modified_base 40: mod_base = OTHER; note = 2'-O-methyl cytidine
  modified_base 69: mod_base = OTHER; note = 2'-O-methyl adenosine
  modified_base 70: mod_base = OTHER; note = 2'-O-methyl cytidine
  modified_base 71: mod_base = OTHER; note = 2'-O-methyl uridine
  modified_base 72: mod_base = OTHER; note = 2'-O-methyl uridine
  modified_base 73: mod_base = OTHER; note = 2'-O-methyl guanosine
  modified_base 74: mod_base = OTHER; note = 2'-O-methyl adenosine
  modified_base 75: mod_base = OTHER; note = 2'-O-methyl adenosine
  modified_base 76: mod_base = OTHER; note = 2'-O-methyl adenosine
  modified_base 77: mod_base = OTHER; note = 2'-O-methyl adenosine
  modified_base 78: mod_base = OTHER; note = 2'-O-methyl adenosine
  modified_base 79: mod_base = OTHER; note = 2'-O-methyl guanosine
  modified_base 80: mod_base = OTHER; note = 2'-O-methyl uridine
  modified_base 81: mod_base = OTHER; note = 2'-O-methyl guanosine
  modified_base 82: mod_base = OTHER; note = 2'-O-methyl guanosine
  modified_base 83: mod_base = OTHER; note = 2'-O-methyl cytidine
  modified_base 84: mod_base = OTHER; note = 2'-O-methyl adenosine
  modified_base 85: mod_base = OTHER; note = 2'-O-methyl cytidine
  modified_base 86: mod_base = OTHER; note = 2'-O-methyl cytidine
  modified_base 87: mod_base = OTHER; note = 2'-O-methyl guanosine
  modified_base 88: mod_base = OTHER; note = 2'-O-methyl adenosine
  modified_base 89: mod_base = OTHER; note = 2'-O-methyl guanosine
  modified_base 90: mod_base = OTHER; note = 2'-O-methyl uridine
  modified_base 91: mod_base = OTHER; note = 2'-O-methyl cytidine
  modified_base 92: mod_base = OTHER; note = 2'-O-methyl guanosine
  modified_base 93: mod_base = OTHER; note = 2'-O-methyl guanosine
  modified_base 94: mod_base = OTHER; note = 2'-O-methyl uridine
  modified_base 95: mod_base = OTHER; note = 2'-O-methyl guanosine
  modified_base 96: mod_base = OTHER; note = 2'-O-methyl cytidine
  modified_base 127: mod_base = OTHER; note = guanosine phosphorothioate
  modified_base 128: mod_base = OTHER; note = 2'-O-methyl uridine phosphorothioate
  modified_base 129: mod_base = OTHER; note = 2'-O-methyl guanosine phosphorothioate
  modified_base 130: mod_base = OTHER; note = 2'-O-methyl cytidine
catggtgcacctgactcctggttttagagctagaaatagcaagttaaaataaggctagtccgttatcaacttgaaaaagtggcaccgagtcggtgcagtaacggcagacttttctgctggagtcaggtgc

SEQ ID NO: 20914 - RNA, 130 nt, synthetic construct
  source 1..130: mol_type = other RNA
  modified_base 1: mod_base = OTHER; note = 2'-O-methyl cytidine phosphorothioate
  modified_base 2: mod_base = OTHER; note = 2'-O-methyl adenosine phosphorothioate
  modified_base 3: mod_base = OTHER; note = 2'-O-methyl uridine phosphorothioate
  modified_base 29: mod_base = OTHER; note = 2'-O-methyl guanosine
  modified_base 30: mod_base = OTHER; note = 2'-O-methyl cytidine
  modified_base 31: mod_base = OTHER; note = 2'-O-methyl uridine
  modified_base 32: mod_base = OTHER; note = 2'-O-methyl adenosine
  modified_base 33: mod_base = OTHER; note = 2'-O-methyl guanosine
  modified_base 34: mod_base = OTHER; note = 2'-O-methyl adenosine
  modified_base 35: mod_base = OTHER; note = 2'-O-methyl adenosine
  modified_base 36: mod_base = OTHER; note = 2'-O-methyl adenosine
  modified_base 37: mod_base = OTHER; note = 2'-O-methyl uridine
  modified_base 38: mod_base = OTHER; note = 2'-O-methyl adenosine
  modified_base 39: mod_base = OTHER; note = 2'-O-methyl guanosine
  modified_base 40: mod_base = OTHER; note = 2'-O-methyl cytidine
  modified_base 69: mod_base = OTHER; note = 2'-O-methyl adenosine
  modified_base 70: mod_base = OTHER; note = 2'-O-methyl cytidine
  modified_base 71: mod_base = OTHER; note = 2'-O-methyl uridine
  modified_base 72: mod_base = OTHER; note = 2'-O-methyl uridine
  modified_base 73: mod_base = OTHER; note = 2'-O-methyl guanosine
  modified_base 74: mod_base = OTHER; note = 2'-O-methyl adenosine
  modified_base 75: mod_base = OTHER; note = 2'-O-methyl adenosine
  modified_base 76: mod_base = OTHER; note = 2'-O-methyl adenosine
  modified_base 77: mod_base = OTHER; note = 2'-O-methyl adenosine
  modified_base 78: mod_base = OTHER; note = 2'-O-methyl adenosine
  modified_base 79: mod_base = OTHER; note = 2'-O-methyl guanosine
  modified_base 80: mod_base = OTHER; note = 2'-O-methyl uridine
  modified_base 81: mod_base = OTHER; note = 2'-O-methyl guanosine
  modified_base 82: mod_base = OTHER; note = 2'-O-methyl guanosine
  modified_base 83: mod_base = OTHER; note = 2'-O-methyl cytidine
  modified_base 84: mod_base = OTHER; note = 2'-O-methyl adenosine
  modified_base 85: mod_base = OTHER; note = 2'-O-methyl cytidine
  modified_base 86: mod_base = OTHER; note = 2'-O-methyl cytidine
  modified_base 87: mod_base = OTHER; note = 2'-O-methyl guanosine
  modified_base 88: mod_base = OTHER; note = 2'-O-methyl adenosine
  modified_base 89: mod_base = OTHER; note = 2'-O-methyl guanosine
  modified_base 90: mod_base = OTHER; note = 2'-O-methyl uridine
  modified_base 91: mod_base = OTHER; note = 2'-O-methyl cytidine
  modified_base 92: mod_base = OTHER; note = 2'-O-methyl guanosine
  modified_base 93: mod_base = OTHER; note = 2'-O-methyl guanosine
  modified_base 94: mod_base = OTHER; note = 2'-O-methyl uridine
  modified_base 95: mod_base = OTHER; note = 2'-O-methyl guanosine
  modified_base 96: mod_base = OTHER; note = 2'-O-methyl cytidine
  modified_base 127: mod_base = OTHER; note = guanosine phosphorothioate
  modified_base 128: mod_base = OTHER; note = 2'-O-methyl uridine phosphorothioate
  modified_base 129: mod_base = OTHER; note = 2'-O-methyl guanosine phosphorothioate
  modified_base 130: mod_base = OTHER; note = 2'-O-methyl cytidine
catggtgcacctgactcctggttttagagctagaaatagcaagttaaaataaggctagtccgttatcaacttgaaaaagtggcaccgagtcggtgcagtaacggcagatttctctgccggagtcaggtgc

SEQ ID NO: 20915 - RNA, 130 nt, synthetic construct
  source 1..130: mol_type = other RNA
  modified_base 1: mod_base = OTHER; note = 2'-O-methyl cytidine phosphorothioate
  modified_base 2: mod_base = OTHER; note = 2'-O-methyl adenosine phosphorothioate
  modified_base 3: mod_base = OTHER; note = 2'-O-methyl uridine phosphorothioate
  modified_base 29: mod_base = OTHER; note = 2'-O-methyl guanosine
  modified_base 30: mod_base = OTHER; note = 2'-O-methyl cytidine
  modified_base 31: mod_base = OTHER; note = 2'-O-methyl uridine
  modified_base 32: mod_base = OTHER; note = 2'-O-methyl adenosine
  modified_base 33: mod_base = OTHER; note = 2'-O-methyl guanosine
  modified_base 34: mod_base = OTHER; note = 2'-O-methyl adenosine
  modified_base 35: mod_base = OTHER; note = 2'-O-methyl adenosine
  modified_base 36: mod_base = OTHER; note = 2'-O-methyl adenosine
  modified_base 37: mod_base = OTHER; note = 2'-O-methyl uridine
  modified_base 38: mod_base = OTHER; note = 2'-O-methyl adenosine
  modified_base 39: mod_base = OTHER; note = 2'-O-methyl guanosine
  modified_base 40: mod_base = OTHER; note = 2'-O-methyl cytidine
  modified_base 69: mod_base = OTHER; note = 2'-O-methyl adenosine
  modified_base 70: mod_base = OTHER; note = 2'-O-methyl cytidine
  modified_base 71: mod_base = OTHER; note = 2'-O-methyl uridine
  modified_base 72: mod_base = OTHER; note = 2'-O-methyl uridine
  modified_base 73: mod_base = OTHER; note = 2'-O-methyl guanosine
  modified_base 74: mod_base = OTHER; note = 2'-O-methyl adenosine
  modified_base 75: mod_base = OTHER; note = 2'-O-methyl adenosine
  modified_base 76: mod_base = OTHER; note = 2'-O-methyl adenosine
  modified_base 77: mod_base = OTHER; note = 2'-O-methyl adenosine
  modified_base 78: mod_base = OTHER; note = 2'-O-methyl adenosine
  modified_base 79: mod_base = OTHER; note = 2'-O-methyl guanosine
  modified_base 80: mod_base = OTHER; note = 2'-O-methyl uridine
  modified_base 81: mod_base = OTHER; note = 2'-O-methyl guanosine
  modified_base 82: mod_base = OTHER; note = 2'-O-methyl guanosine
  modified_base 83: mod_base = OTHER; note = 2'-O-methyl cytidine
  modified_base 84: mod_base = OTHER; note = 2'-O-methyl adenosine
  modified_base 85: mod_base = OTHER; note = 2'-O-methyl cytidine
  modified_base 86: mod_base = OTHER; note = 2'-O-methyl cytidine
  modified_base 87: mod_base = OTHER; note = 2'-O-methyl guanosine
  modified_base 88: mod_base = OTHER; note = 2'-O-methyl adenosine
  modified_base 89: mod_base = OTHER; note = 2'-O-methyl guanosine
  modified_base 90: mod_base = OTHER; note = 2'-O-methyl uridine
  modified_base 91: mod_base = OTHER; note = 2'-O-methyl cytidine
  modified_base 92: mod_base = OTHER; note = 2'-O-methyl guanosine
  modified_base 93: mod_base = OTHER; note = 2'-O-methyl guanosine
  modified_base 94: mod_base = OTHER; note = 2'-O-methyl uridine
  modified_base 95: mod_base = OTHER; note = 2'-O-methyl guanosine
  modified_base 96: mod_base = OTHER; note = 2'-O-methyl cytidine
  modified_base 127: mod_base = OTHER; note = guanosine phosphorothioate
  modified_base 128: mod_base = OTHER; note = 2'-O-methyl uridine phosphorothioate
  modified_base 129: mod_base = OTHER; note = 2'-O-methyl guanosine phosphorothioate
  modified_base 130: mod_base = OTHER; note = 2'-O-methyl cytidine
catggtgcacctgactcctggttttagagctagaaatagcaagttaaaataaggctagtccgttatcaacttgaaaaagtggcaccgagtcggtgcagtaacggcagatttctctgcgggagtcaggtgc

SEQ ID NO: 20916 - RNA, 130 nt, synthetic construct
  source 1..130: mol_type = other RNA
  modified_base 1: mod_base = OTHER; note = 2'-O-methyl cytidine phosphorothioate
  modified_base 2: mod_base = OTHER; note = 2'-O-methyl adenosine phosphorothioate
  modified_base 3: mod_base = OTHER; note = 2'-O-methyl uridine phosphorothioate
  modified_base 29: mod_base = OTHER; note = 2'-O-methyl guanosine
  modified_base 30: mod_base = OTHER; note = 2'-O-methyl cytidine
  modified_base 31: mod_base = OTHER; note = 2'-O-methyl uridine
  modified_base 32: mod_base = OTHER; note = 2'-O-methyl adenosine
  modified_base 33: mod_base = OTHER; note = 2'-O-methyl guanosine
  modified_base 34: mod_base = OTHER; note = 2'-O-methyl adenosine
  modified_base 35: mod_base = OTHER; note = 2'-O-methyl adenosine
  modified_base 36: mod_base = OTHER; note = 2'-O-methyl adenosine
  modified_base 37: mod_base = OTHER; note = 2'-O-methyl uridine
  modified_base 38: mod_base = OTHER; note = 2'-O-methyl adenosine
  modified_base 39: mod_base = OTHER; note = 2'-O-methyl guanosine
  modified_base 40: mod_base = OTHER; note = 2'-O-methyl cytidine
  modified_base 69: mod_base = OTHER; note = 2'-O-methyl adenosine
  modified_base 70: mod_base = OTHER; note = 2'-O-methyl cytidine
  modified_base 71: mod_base = OTHER; note = 2'-O-methyl uridine
  modified_base 72: mod_base = OTHER; note = 2'-O-methyl uridine
  modified_base 73: mod_base = OTHER; note = 2'-O-methyl guanosine
  modified_base 74: mod_base = OTHER; note = 2'-O-methyl adenosine
  modified_base 75: mod_base = OTHER; note = 2'-O-methyl adenosine
  modified_base 76: mod_base = OTHER; note = 2'-O-methyl adenosine
  modified_base 77: mod_base = OTHER; note = 2'-O-methyl adenosine
  modified_base 78: mod_base = OTHER; note = 2'-O-methyl adenosine
  modified_base 79: mod_base = OTHER; note = 2'-O-methyl guanosine
  modified_base 80: mod_base = OTHER; note = 2'-O-methyl uridine
  modified_base 81: mod_base = OTHER; note = 2'-O-methyl guanosine
  modified_base 82: mod_base = OTHER; note = 2'-O-methyl guanosine
  modified_base 83: mod_base = OTHER; note = 2'-O-methyl cytidine
  modified_base 84: mod_base = OTHER; note = 2'-O-methyl adenosine
  modified_base 85: mod_base = OTHER; note = 2'-O-methyl cytidine
  modified_base 86: mod_base = OTHER; note = 2'-O-methyl cytidine
  modified_base 87: mod_base = OTHER; note = 2'-O-methyl guanosine
  modified_base 88: mod_base = OTHER; note = 2'-O-methyl adenosine
  modified_base 89: mod_base = OTHER; note = 2'-O-methyl guanosine
  modified_base 90: mod_base = OTHER; note = 2'-O-methyl uridine
  modified_base 91: mod_base = OTHER; note = 2'-O-methyl cytidine
  modified_base 92: mod_base = OTHER; note = 2'-O-methyl guanosine
  modified_base 93: mod_base = OTHER; note = 2'-O-methyl guanosine
  modified_base 94: mod_base = OTHER; note = 2'-O-methyl uridine
  modified_base 95: mod_base = OTHER; note = 2'-O-methyl guanosine
  modified_base 96: mod_base = OTHER; note = 2'-O-methyl cytidine
  modified_base 127: mod_base = OTHER; note = guanosine phosphorothioate
  modified_base 128: mod_base = OTHER; note = 2'-O-methyl uridine phosphorothioate
  modified_base 129: mod_base = OTHER; note = 2'-O-methyl guanosine phosphorothioate
  modified_base 130: mod_base = OTHER; note = 2'-O-methyl cytidine
catggtgcacctgactcctggttttagagctagaaatagcaagttaaaataaggctagtccgttatcaacttgaaaaagtggcaccgagtcggtgcagtaacggcagatttctctgctggagtcaggtgc

SEQ ID NO: 20917 - RNA, 130 nt, synthetic construct
  source 1..130: mol_type = other RNA
  modified_base 1: mod_base = OTHER; note = 2'-O-methyl cytidine phosphorothioate
  modified_base 2: mod_base = OTHER; note = 2'-O-methyl adenosine phosphorothioate
  modified_base 3: mod_base = OTHER; note = 2'-O-methyl uridine phosphorothioate
  modified_base 29: mod_base = OTHER; note = 2'-O-methyl guanosine
  modified_base 30: mod_base = OTHER; note = 2'-O-methyl cytidine
  modified_base 31: mod_base = OTHER; note = 2'-O-methyl uridine
  modified_base 32: mod_base = OTHER; note = 2'-O-methyl adenosine
  modified_base 33: mod_base = OTHER; note = 2'-O-methyl guanosine
  modified_base 34: mod_base = OTHER; note = 2'-O-methyl adenosine
  modified_base 35: mod_base = OTHER; note = 2'-O-methyl adenosine
  modified_base 36: mod_base = OTHER; note = 2'-O-methyl adenosine
  modified_base 37: mod_base = OTHER; note = 2'-O-methyl uridine
  modified_base 38: mod_base = OTHER; note = 2'-O-methyl adenosine
  modified_base 39: mod_base = OTHER; note = 2'-O-methyl guanosine
  modified_base 40: mod_base = OTHER; note = 2'-O-methyl cytidine
  modified_base 69: mod_base = OTHER; note = 2'-O-methyl adenosine
  modified_base 70: mod_base = OTHER; note = 2'-O-methyl cytidine
  modified_base 71: mod_base = OTHER; note = 2'-O-methyl uridine
  modified_base 72: mod_base = OTHER; note = 2'-O-methyl uridine
  modified_base 73: mod_base = OTHER; note = 2'-O-methyl guanosine
  modified_base 74: mod_base = OTHER; note = 2'-O-methyl adenosine
  modified_base 75: mod_base = OTHER; note = 2'-O-methyl adenosine
  modified_base 76: mod_base = OTHER; note = 2'-O-methyl adenosine
  modified_base 77: mod_base = OTHER; note = 2'-O-methyl adenosine
  modified_base 78: mod_base = OTHER; note = 2'-O-methyl adenosine
  modified_base 79: mod_base = OTHER; note = 2'-O-methyl guanosine
  modified_base 80: mod_base = OTHER; note = 2'-O-methyl uridine
  modified_base 81: mod_base = OTHER; note = 2'-O-methyl guanosine
  modified_base 82: mod_base = OTHER; note = 2'-O-methyl guanosine
  modified_base 83: mod_base = OTHER; note = 2'-O-methyl cytidine
  modified_base 84: mod_base = OTHER; note = 2'-O-methyl adenosine
  modified_base 85: mod_base = OTHER; note = 2'-O-methyl cytidine
  modified_base 86: mod_base = OTHER; note = 2'-O-methyl cytidine
  modified_base 87: mod_base = OTHER; note = 2'-O-methyl guanosine
  modified_base 88: mod_base = OTHER; note = 2'-O-methyl adenosine
  modified_base 89: mod_base = OTHER; note = 2'-O-methyl guanosine
  modified_base 90: mod_base = OTHER; note = 2'-O-methyl uridine
  modified_base 91: mod_base = OTHER; note = 2'-O-methyl cytidine
  modified_base 92: mod_base = OTHER; note = 2'-O-methyl guanosine
  modified_base 93: mod_base = OTHER; note = 2'-O-methyl guanosine
  modified_base 94: mod_base = OTHER; note = 2'-O-methyl uridine
  modified_base 95: mod_base = OTHER; note = 2'-O-methyl guanosine
  modified_base 96: mod_base = OTHER; note = 2'-O-methyl cytidine
  modified_base 127: mod_base = OTHER; note = guanosine phosphorothioate
  modified_base 128: mod_base = OTHER; note = 2'-O-methyl uridine phosphorothioate
  modified_base 129: mod_base = OTHER; note = 2'-O-methyl guanosine phosphorothioate
  modified_base 130: mod_base = OTHER; note = 2'-O-methyl cytidine
catggtgcacctgactcctggttttagagctagaaatagcaagttaaaataaggctagtccgttatcaacttgaaaaagtggcaccgagtcggtgcagtaacggcagatttttctgcaggagtcaggtgc

SEQ ID NO: 20918 - RNA, 130 nt, synthetic construct
  source 1..130: mol_type = other RNA
  modified_base 1: mod_base = OTHER; note = 2'-O-methyl cytidine phosphorothioate
  modified_base 2: mod_base = OTHER; note = 2'-O-methyl adenosine phosphorothioate
  modified_base 3: mod_base = OTHER; note = 2'-O-methyl uridine phosphorothioate
  modified_base 29: mod_base = OTHER; note = 2'-O-methyl guanosine
  modified_base 30: mod_base = OTHER; note = 2'-O-methyl cytidine
  modified_base 31: mod_base = OTHER; note = 2'-O-methyl uridine
  modified_base 32: mod_base = OTHER; note = 2'-O-methyl adenosine
  modified_base 33: mod_base = OTHER; note = 2'-O-methyl guanosine
  modified_base 34: mod_base = OTHER; note = 2'-O-methyl adenosine
  modified_base 35: mod_base = OTHER; note = 2'-O-methyl adenosine
  modified_base 36: mod_base = OTHER; note = 2'-O-methyl adenosine
  modified_base 37: mod_base = OTHER; note = 2'-O-methyl uridine
  modified_base 38: mod_base = OTHER; note = 2'-O-methyl adenosine
  modified_base 39: mod_base = OTHER; note = 2'-O-methyl guanosine
  modified_base 40: mod_base = OTHER; note = 2'-O-methyl cytidine
  modified_base 69: mod_base = OTHER; note = 2'-O-methyl adenosine
  modified_base 70: mod_base = OTHER; note = 2'-O-methyl cytidine
  modified_base 71: mod_base = OTHER; note = 2'-O-methyl uridine
  modified_base 72: mod_base = OTHER; note = 2'-O-methyl uridine
  modified_base 73: mod_base = OTHER; note = 2'-O-methyl guanosine
  modified_base 74: mod_base = OTHER; note = 2'-O-methyl adenosine
  modified_base 75: mod_base = OTHER; note = 2'-O-methyl adenosine
  modified_base 76: mod_base = OTHER; note = 2'-O-methyl adenosine
  modified_base 77: mod_base = OTHER; note = 2'-O-methyl adenosine
  modified_base 78: mod_base = OTHER; note = 2'-O-methyl adenosine
  modified_base 79: mod_base = OTHER; note = 2'-O-methyl guanosine
  modified_base 80: mod_base = OTHER; note = 2'-O-methyl uridine
  modified_base 81: mod_base = OTHER; note = 2'-O-methyl guanosine
  modified_base 82: mod_base = OTHER; note = 2'-O-methyl guanosine
  modified_base 83: mod_base = OTHER; note = 2'-O-methyl cytidine
  modified_base 84: mod_base = OTHER; note = 2'-O-methyl adenosine
  modified_base 85: mod_base = OTHER; note = 2'-O-methyl cytidine
  modified_base 86: mod_base = OTHER; note = 2'-O-methyl cytidine
  modified_base 87: mod_base = OTHER; note = 2'-O-methyl guanosine
  modified_base 88: mod_base = OTHER; note = 2'-O-methyl adenosine
  modified_base 89: mod_base = OTHER; note = 2'-O-methyl guanosine
  modified_base 90: mod_base = OTHER; note = 2'-O-methyl uridine
  modified_base 91: mod_base = OTHER; note = 2'-O-methyl cytidine
  modified_base 92: mod_base = OTHER; note = 2'-O-methyl guanosine
  modified_base 93: mod_base = OTHER; note = 2'-O-methyl guanosine
  modified_base 94: mod_base = OTHER; note = 2'-O-methyl uridine
  modified_base 95: mod_base = OTHER; note = 2'-O-methyl guanosine
  modified_base 96: mod_base = OTHER; note = 2'-O-methyl cytidine
  modified_base 127: mod_base = OTHER; note = guanosine phosphorothioate
  modified_base 128: mod_base = OTHER; note = 2'-O-methyl uridine phosphorothioate
  modified_base 129: mod_base = OTHER; note = 2'-O-methyl guanosine phosphorothioate
  modified_base 130: mod_base = OTHER; note = 2'-O-methyl cytidine
catggtgcacctgactcctggttttagagctagaaatagcaagttaaaataaggctagtccgttatcaacttgaaaaagtggcaccgagtcggtgcagtaacggcagatttttctgccggagtcaggtgc

SEQ ID NO: 20919 - RNA, 130 nt, synthetic construct
  source 1..130: mol_type = other RNA
  modified_base 1: mod_base = OTHER; note = 2'-O-methyl cytidine phosphorothioate
  modified_base 2: mod_base = OTHER; note = 2'-O-methyl adenosine phosphorothioate
  modified_base 3: mod_base = OTHER; note = 2'-O-methyl uridine phosphorothioate
  modified_base 29: mod_base = OTHER; note = 2'-O-methyl guanosine
  modified_base 30: mod_base = OTHER; note = 2'-O-methyl cytidine
  modified_base 31: mod_base = OTHER; note = 2'-O-methyl uridine
  modified_base 32: mod_base = OTHER; note = 2'-O-methyl adenosine
  modified_base 33: mod_base = OTHER; note = 2'-O-methyl guanosine
  modified_base 34: mod_base = OTHER; note = 2'-O-methyl adenosine
  modified_base 35: mod_base = OTHER; note = 2'-O-methyl adenosine
  modified_base 36: mod_base = OTHER; note = 2'-O-methyl adenosine
  modified_base 37: mod_base = OTHER; note = 2'-O-methyl uridine
  modified_base 38: mod_base = OTHER; note = 2'-O-methyl adenosine
  modified_base 39: mod_base = OTHER; note = 2'-O-methyl guanosine
  modified_base 40: mod_base = OTHER; note = 2'-O-methyl cytidine
  modified_base 69: mod_base = OTHER; note = 2'-O-methyl adenosine
  modified_base 70: mod_base = OTHER; note = 2'-O-methyl cytidine
  modified_base 71: mod_base = OTHER; note = 2'-O-methyl uridine
  modified_base 72: mod_base = OTHER; note = 2'-O-methyl uridine
  modified_base 73: mod_base = OTHER; note = 2'-O-methyl guanosine
  modified_base 74: mod_base = OTHER; note = 2'-O-methyl adenosine
  modified_base 75: mod_base = OTHER; note = 2'-O-methyl adenosine
  modified_base 76: mod_base = OTHER; note = 2'-O-methyl adenosine
  modified_base 77: mod_base = OTHER; note = 2'-O-methyl adenosine
  modified_base 78: mod_base = OTHER; note = 2'-O-methyl adenosine
  modified_base 79: mod_base = OTHER; note = 2'-O-methyl guanosine
  modified_base 80: mod_base = OTHER; note = 2'-O-methyl uridine
  modified_base 81: mod_base = OTHER; note = 2'-O-methyl guanosine
  modified_base 82: mod_base = OTHER; note = 2'-O-methyl guanosine
  modified_base 83: mod_base = OTHER; note = 2'-O-methyl cytidine
  modified_base 84: mod_base = OTHER; note = 2'-O-methyl adenosine
  modified_base 85: mod_base = OTHER; note = 2'-O-methyl cytidine
  modified_base 86: mod_base = OTHER; note = 2'-O-methyl cytidine
  modified_base 87: mod_base = OTHER; note = 2'-O-methyl guanosine
  modified_base 88: mod_base = OTHER; note = 2'-O-methyl adenosine
  modified_base 89: mod_base = OTHER; note = 2'-O-methyl guanosine
  modified_base 90: mod_base = OTHER; note = 2'-O-methyl uridine
  modified_base 91: mod_base = OTHER; note = 2'-O-methyl cytidine
  modified_base 92: mod_base = OTHER; note = 2'-O-methyl guanosine
  modified_base 93: mod_base = OTHER; note = 2'-O-methyl guanosine
  modified_base 94: mod_base = OTHER; note = 2'-O-methyl uridine
  modified_base 95: mod_base = OTHER; note = 2'-O-methyl guanosine
  modified_base 96: mod_base = OTHER; note = 2'-O-methyl cytidine
  modified_base 127: mod_base = OTHER; note = guanosine phosphorothioate
  modified_base 128: mod_base = OTHER; note = 2'-O-methyl uridine phosphorothioate
  modified_base 129: mod_base = OTHER; note = 2'-O-methyl guanosine phosphorothioate
  modified_base 130: mod_base = OTHER; note = 2'-O-methyl cytidine
catggtgcacctgactcctggttttagagctagaaatagcaagttaaaataaggctagtccgttatcaacttgaaaaagtggcaccgagtcggtgcagtaacggcagatttttctgcgggagtcaggtgc

SEQ ID NO: 20920 - RNA, 130 nt, synthetic construct
  source 1..130: mol_type = other RNA
  modified_base 1: mod_base = OTHER; note = 2'-O-methyl cytidine phosphorothioate
  modified_base 2: mod_base = OTHER; note = 2'-O-methyl adenosine phosphorothioate
  modified_base 3: mod_base = OTHER; note = 2'-O-methyl uridine phosphorothioate
  modified_base 29: mod_base = OTHER; note = 2'-O-methyl guanosine
  modified_base 30: mod_base = OTHER; note = 2'-O-methyl cytidine
  modified_base 31: mod_base = OTHER; note = 2'-O-methyl uridine
  modified_base 32: mod_base = OTHER; note = 2'-O-methyl adenosine
  modified_base 33: mod_base = OTHER; note = 2'-O-methyl guanosine
  modified_base 34: mod_base = OTHER; note = 2'-O-methyl adenosine
  modified_base 35: mod_base = OTHER; note = 2'-O-methyl adenosine
  modified_base 36: mod_base = OTHER; note = 2'-O-methyl adenosine
  modified_base 37: mod_base = OTHER; note = 2'-O-methyl uridine
  modified_base 38: mod_base = OTHER; note = 2'-O-methyl adenosine
  modified_base 39: mod_base = OTHER; note = 2'-O-methyl guanosine
  modified_base 40: mod_base = OTHER; note = 2'-O-methyl cytidine
  modified_base 69: mod_base = OTHER; note = 2'-O-methyl adenosine
  modified_base 70: mod_base = OTHER; note = 2'-O-methyl cytidine
  modified_base 71: mod_base = OTHER; note = 2'-O-methyl uridine
  modified_base 72: mod_base = OTHER; note = 2'-O-methyl uridine
  modified_base 73: mod_base = OTHER; note = 2'-O-methyl guanosine
  modified_base 74: mod_base = OTHER; note = 2'-O-methyl adenosine
  modified_base 75: mod_base = OTHER; note = 2'-O-methyl adenosine
  modified_base 76: mod_base = OTHER; note = 2'-O-methyl adenosine
  modified_base 77: mod_base = OTHER; note = 2'-O-methyl adenosine
  modified_base 78: mod_base = OTHER; note = 2'-O-methyl adenosine
  modified_base 79: mod_base = OTHER; note = 2'-O-methyl guanosine
  modified_base 80: mod_base = OTHER; note = 2'-O-methyl uridine
  modified_base 81: mod_base = OTHER; note = 2'-O-methyl guanosine
  modified_base 82: mod_base = OTHER; note = 2'-O-methyl guanosine
  modified_base 83: mod_base = OTHER; note = 2'-O-methyl cytidine
  modified_base 84: mod_base = OTHER; note = 2'-O-methyl adenosine
  modified_base 85: mod_base = OTHER; note = 2'-O-methyl cytidine
  modified_base 86: mod_base = OTHER; note = 2'-O-methyl cytidine
  modified_base 87: mod_base = OTHER; note = 2'-O-methyl guanosine
  modified_base 88: mod_base = OTHER; note = 2'-O-methyl adenosine
  modified_base 89: mod_base = OTHER; note = 2'-O-methyl guanosine
  modified_base 90: mod_base = OTHER; note = 2'-O-methyl uridine
  modified_base 91: mod_base = OTHER; note = 2'-O-methyl cytidine
  modified_base 92: mod_base = OTHER; note = 2'-O-methyl guanosine
  modified_base 93: mod_base = OTHER; note = 2'-O-methyl guanosine
  modified_base 94: mod_base = OTHER; note = 2'-O-methyl uridine
  modified_base 95: mod_base = OTHER; note = 2'-O-methyl guanosine
  modified_base 96: mod_base = OTHER; note = 2'-O-methyl cytidine
  modified_base 127: mod_base = OTHER; note = guanosine phosphorothioate
  modified_base 128: mod_base = OTHER; note = 2'-O-methyl uridine phosphorothioate
  modified_base 129: mod_base = OTHER; note = 2'-O-methyl guanosine phosphorothioate
  modified_base 130: mod_base = OTHER; note = 2'-O-methyl cytidine
catggtgcacctgactcctggttttagagctagaaatagcaagttaaaataaggctagtccgttatcaacttgaaaaagtggcaccgagtcggtgcagtaacggcagatttttctgctggagtcaggtgc

SEQ ID NO: 20921 - RNA, 130 nt, synthetic construct
  source 1..130: mol_type = other RNA
  modified_base 1: mod_base = OTHER; note = 2'-O-methyl cytidine phosphorothioate
  modified_base 2: mod_base = OTHER; note = 2'-O-methyl adenosine phosphorothioate
  modified_base 3: mod_base = OTHER; note = 2'-O-methyl uridine phosphorothioate
  modified_base 29: mod_base = OTHER; note = 2'-O-methyl guanosine
  modified_base 30: mod_base = OTHER; note = 2'-O-methyl cytidine
  modified_base 31: mod_base = OTHER; note = 2'-O-methyl uridine
  modified_base 32: mod_base = OTHER; note = 2'-O-methyl adenosine
  modified_base 33: mod_base = OTHER; note = 2'-O-methyl guanosine
  modified_base 34: mod_base = OTHER; note = 2'-O-methyl adenosine
  modified_base 35: mod_base = OTHER; note = 2'-O-methyl adenosine
  modified_base 36: mod_base = OTHER; note = 2'-O-methyl adenosine
  modified_base 37: mod_base = OTHER; note = 2'-O-methyl uridine
  modified_base 38: mod_base = OTHER; note = 2'-O-methyl adenosine
  modified_base 39: mod_base = OTHER; note = 2'-O-methyl guanosine
  modified_base 40: mod_base = OTHER; note = 2'-O-methyl cytidine
  modified_base 69: mod_base = OTHER; note = 2'-O-methyl adenosine
  modified_base 70: mod_base = OTHER; note = 2'-O-methyl cytidine
  modified_base 71: mod_base = OTHER; note = 2'-O-methyl uridine
  modified_base 72: mod_base = OTHER; note = 2'-O-methyl uridine
  modified_base 73: mod_base = OTHER; note = 2'-O-methyl guanosine
  modified_base 74: mod_base = OTHER; note = 2'-O-methyl adenosine
  modified_base 75: mod_base = OTHER; note = 2'-O-methyl adenosine
  modified_base 76: mod_base = OTHER; note = 2'-O-methyl adenosine
  modified_base 77: mod_base = OTHER; note = 2'-O-methyl adenosine
  modified_base 78: mod_base = OTHER; note = 2'-O-methyl adenosine
  modified_base 79: mod_base = OTHER; note = 2'-O-methyl guanosine
  modified_base 80: mod_base = OTHER; note = 2'-O-methyl uridine
  modified_base 81: mod_base = OTHER; note = 2'-O-methyl guanosine
  modified_base 82: mod_base = OTHER; note = 2'-O-methyl guanosine
  modified_base 83: mod_base = OTHER; note = 2'-O-methyl cytidine
  modified_base 84: mod_base = OTHER; note = 2'-O-methyl adenosine
  modified_base 85: mod_base = OTHER; note = 2'-O-methyl cytidine
  modified_base 86: mod_base = OTHER; note = 2'-O-methyl cytidine
  modified_base 87: mod_base = OTHER; note = 2'-O-methyl guanosine
  modified_base 88: mod_base = OTHER; note = 2'-O-methyl adenosine
  modified_base 89: mod_base = OTHER; note = 2'-O-methyl guanosine
  modified_base 90: mod_base = OTHER; note = 2'-O-methyl uridine
  modified_base 91: mod_base = OTHER; note = 2'-O-methyl cytidine
  modified_base 92: mod_base = OTHER; note = 2'-O-methyl guanosine
  modified_base 93: mod_base = OTHER; note = 2'-O-methyl guanosine
  modified_base 94: mod_base = OTHER; note = 2'-O-methyl uridine
  modified_base 95: mod_base = OTHER; note = 2'-O-methyl guanosine
  modified_base 96: mod_base = OTHER; note = 2'-O-methyl cytidine
  modified_base 127: mod_base = OTHER; note = guanosine phosphorothioate
  modified_base 128: mod_base = OTHER; note = 2'-O-methyl uridine phosphorothioate
  modified_base 129: mod_base = OTHER; note = 2'-O-methyl guanosine phosphorothioate
  modified_base 130: mod_base = OTHER; note = 2'-O-methyl cytidine
catggtgcacctgactcctggttttagagctagaaatagcaagttaaaataaggctagtccgttatcaacttgaaaaagtggcaccgagtcggtgcagtaacggctgatttttctgccggagtcaggtgc

SEQ ID NO: 20922 - RNA, 130 nt, synthetic construct
  source 1..130: mol_type = other RNA
  modified_base 1: mod_base = OTHER; note = 2'-O-methyl cytidine phosphorothioate
  modified_base 2: mod_base = OTHER; note = 2'-O-methyl adenosine phosphorothioate
  modified_base 3: mod_base = OTHER; note = 2'-O-methyl uridine phosphorothioate
  modified_base 29: mod_base = OTHER; note = 2'-O-methyl guanosine
  modified_base 30: mod_base = OTHER; note = 2'-O-methyl cytidine
  modified_base 31: mod_base = OTHER; note = 2'-O-methyl uridine
  modified_base 32: mod_base = OTHER; note = 2'-O-methyl adenosine
  modified_base 33: mod_base = OTHER; note = 2'-O-methyl guanosine
  modified_base 34: mod_base = OTHER; note = 2'-O-methyl adenosine
  modified_base 35: mod_base = OTHER; note = 2'-O-methyl adenosine
  modified_base 36: mod_base = OTHER; note = 2'-O-methyl adenosine
  modified_base 37: mod_base = OTHER; note = 2'-O-methyl uridine
  modified_base 38: mod_base = OTHER; note = 2'-O-methyl adenosine
  modified_base 39: mod_base = OTHER; note = 2'-O-methyl guanosine
  modified_base 40: mod_base = OTHER; note = 2'-O-methyl cytidine
  modified_base 69: mod_base = OTHER; note = 2'-O-methyl adenosine
  modified_base 70: mod_base = OTHER; note = 2'-O-methyl cytidine
  modified_base 71: mod_base = OTHER; note = 2'-O-methyl uridine
  modified_base 72: mod_base = OTHER; note = 2'-O-methyl uridine
  modified_base 73: mod_base = OTHER; note = 2'-O-methyl guanosine
  modified_base 74: mod_base = OTHER; note = 2'-O-methyl adenosine
  modified_base 75: mod_base = OTHER; note = 2'-O-methyl adenosine
  modified_base 76: mod_base = OTHER; note = 2'-O-methyl adenosine
  modified_base 77: mod_base = OTHER; note = 2'-O-methyl adenosine
  modified_base 78: mod_base = OTHER; note = 2'-O-methyl adenosine
  modified_base 79: mod_base = OTHER; note = 2'-O-methyl guanosine
  modified_base 80: mod_base = OTHER; note = 2'-O-methyl uridine
  modified_base 81: mod_base = OTHER; note = 2'-O-methyl guanosine
  modified_base 82: mod_base = OTHER; note = 2'-O-methyl guanosine
  modified_base 83: mod_base = OTHER; note = 2'-O-methyl cytidine
  modified_base 84: mod_base = OTHER; note = 2'-O-methyl adenosine
  modified_base 85: mod_base = OTHER; note = 2'-O-methyl cytidine
  modified_base 86: mod_base = OTHER; note = 2'-O-methyl cytidine
  modified_base 87: mod_base = OTHER; note = 2'-O-methyl guanosine
  modified_base 88: mod_base = OTHER; note = 2'-O-methyl adenosine
  modified_base 89: mod_base = OTHER; note = 2'-O-methyl guanosine
  modified_base 90: mod_base = OTHER; note = 2'-O-methyl uridine
  modified_base 91: mod_base = OTHER; note = 2'-O-methyl cytidine
  modified_base 92: mod_base = OTHER; note = 2'-O-methyl guanosine
  modified_base 93: mod_base = OTHER; note = 2'-O-methyl guanosine
  modified_base 94: mod_base = OTHER; note = 2'-O-methyl uridine
  modified_base 95: mod_base = OTHER; note = 2'-O-methyl guanosine
  modified_base 96: mod_base = OTHER; note = 2'-O-methyl cytidine
  modified_base 127: mod_base = OTHER; note = guanosine phosphorothioate
  modified_base 128: mod_base = OTHER; note = 2'-O-methyl uridine phosphorothioate
  modified_base 129: mod_base = OTHER; note = 2'-O-methyl guanosine phosphorothioate
  modified_base 130: mod_base = OTHER; note = 2'-O-methyl cytidine
catggtgcacctgactcctggttttagagctagaaatagcaagttaaaataaggctagtccgttatcaacttgaaaaagtggcaccgagtcggtgcagtaacggccgatttttctgccggagtcaggtgc

SEQ ID NO: 20923 - DNA, 76 bp, synthetic construct; identical to SEQ ID NO: 11012
  source 1..76: mol_type = other DNA

SEQ ID NO: 20924 - RNA, 121 nt, synthetic construct
  source 1..121: mol_type = other RNA
  modified_base 1: mod_base = OTHER; note = 2'-O-methyl guanosine phosphorothioate
  modified_base 2: mod_base = OTHER; note = 2'-O-methyl uridine phosphorothioate
  modified_base 3: mod_base = OTHER; note = 2'-O-methyl adenosine phosphorothioate
  modified_base 29: mod_base = OTHER; note = 2'-O-methyl guanosine
  modified_base 30: mod_base = OTHER; note = 2'-O-methyl cytidine
  modified_base 31: mod_base = OTHER; note = 2'-O-methyl uridine
  modified_base 32: mod_base = OTHER; note = 2'-O-methyl adenosine
  modified_base 33: mod_base = OTHER; note = 2'-O-methyl guanosine
  modified_base 34: mod_base = OTHER; note = 2'-O-methyl adenosine
  modified_base 35: mod_base = OTHER; note = 2'-O-methyl adenosine
  modified_base 36: mod_base = OTHER; note = 2'-O-methyl adenosine
  modified_base 37: mod_base = OTHER; note = 2'-O-methyl uridine
  modified_base 38: mod_base = OTHER; note = 2'-O-methyl adenosine
  modified_base 39: mod_base = OTHER; note = 2'-O-methyl guanosine
  modified_base 40: mod_base = OTHER; note = 2'-O-methyl cytidine
  modified_base 69: mod_base = OTHER; note = 2'-O-methyl adenosine
  modified_base 70: mod_base = OTHER; note = 2'-O-methyl cytidine
  modified_base 71: mod_base = OTHER; note = 2'-O-methyl uridine
  modified_base 72: mod_base = OTHER; note = 2'-O-methyl uridine
  modified_base 73: mod_base = OTHER; note = 2'-O-methyl guanosine
  modified_base 74: mod_base = OTHER; note = 2'-O-methyl adenosine
  modified_base 75: mod_base = OTHER; note = 2'-O-methyl adenosine
  modified_base 76: mod_base = OTHER; note = 2'-O-methyl adenosine
  modified_base 77: mod_base = OTHER; note = 2'-O-methyl adenosine
  modified_base 78: mod_base = OTHER; note = 2'-O-methyl adenosine
  modified_base 79: mod_base = OTHER; note = 2'-O-methyl guanosine
  modified_base 80: mod_base = OTHER; note = 2'-O-methyl uridine
  modified_base 81: mod_base = OTHER; note = 2'-O-methyl guanosine
  modified_base 82: mod_base = OTHER; note = 2'-O-methyl guanosine
  modified_base 83: mod_base = OTHER; note = 2'-O-methyl cytidine
  modified_base 84: mod_base = OTHER; note = 2'-O-methyl adenosine
  modified_base 85: mod_base = OTHER; note = 2'-O-methyl cytidine
  modified_base 86: mod_base = OTHER; note = 2'-O-methyl cytidine
  modified_base 87: mod_base = OTHER; note = 2'-O-methyl guanosine
  modified_base 88: mod_base = OTHER; note = 2'-O-methyl adenosine
  modified_base 89: mod_base = OTHER; note = 2'-O-methyl guanosine
  modified_base 90: mod_base = OTHER; note = 2'-O-methyl uridine
  modified_base 91: mod_base = OTHER; note = 2'-O-methyl cytidine
  modified_base 92: mod_base = OTHER; note = 2'-O-methyl guanosine
  modified_base 93: mod_base = OTHER; note = 2'-O-methyl guanosine
  modified_base 94: mod_base = OTHER; note = 2'-O-methyl uridine
  modified_base 95: mod_base = OTHER; note = 2'-O-methyl guanosine
  modified_base 96: mod_base = OTHER; note = 2'-O-methyl cytidine
  modified_base 118: mod_base = OTHER; note = cytidine phosphorothioate
  modified_base 119: mod_base = OTHER; note = 2'-O-methyl uridine phosphorothioate
  modified_base 120: mod_base = OTHER; note = 2'-O-methyl guanosine phosphorothioate
  modified_base 121: mod_base = OTHER; note = 2'-O-methyl cytidine
gtaacggcagacttctcctcgttttagagctagaaatagcaagttaaaataaggctagtccgttatcaacttgaaaaagtggcaccgagtcggtgcacctgactccggccgagaagtctgc

SEQ ID NO: 20925 - RNA, 121 nt, synthetic construct
  source 1..121: mol_type = other RNA
  modified_base 1: mod_base = OTHER; note = 2'-O-methyl guanosine phosphorothioate
  modified_base 2: mod_base = OTHER; note = 2'-O-methyl uridine phosphorothioate
  modified_base 3: mod_base = OTHER; note = 2'-O-methyl adenosine phosphorothioate
  modified_base 29: mod_base = OTHER; note = 2'-O-methyl guanosine
  modified_base 30: mod_base = OTHER; note = 2'-O-methyl cytidine
  modified_base 31: mod_base = OTHER; note = 2'-O-methyl uridine
  modified_base 32: mod_base = OTHER; note = 2'-O-methyl adenosine
  modified_base 33: mod_base = OTHER; note = 2'-O-methyl guanosine
  modified_base 34: mod_base = OTHER; note = 2'-O-methyl adenosine
  modified_base 35: mod_base = OTHER; note = 2'-O-methyl adenosine
  modified_base 36: mod_base = OTHER; note = 2'-O-methyl adenosine
  modified_base 37: mod_base = OTHER; note = 2'-O-methyl uridine
  modified_base 38: mod_base = OTHER; note = 2'-O-methyl adenosine
  modified_base 39: mod_base = OTHER; note = 2'-O-methyl guanosine
  modified_base 40: mod_base = OTHER; note = 2'-O-methyl cytidine
  modified_base 69: mod_base = OTHER; note = 2'-O-methyl adenosine
  modified_base 70: mod_base = OTHER; note = 2'-O-methyl cytidine
  modified_base 71: mod_base = OTHER; note = 2'-O-methyl uridine
  modified_base 72: mod_base = OTHER; note = 2'-O-methyl uridine
  modified_base 73: mod_base = OTHER; note = 2'-O-methyl guanosine
  modified_base 74: mod_base = OTHER; note = 2'-O-methyl adenosine
  modified_base 75: mod_base = OTHER; note = 2'-O-methyl adenosine
  modified_base 76: mod_base = OTHER; note = 2'-O-methyl adenosine
  modified_base 77: mod_base = OTHER; note = 2'-O-methyl adenosine
  modified_base 78: mod_base = OTHER; note = 2'-O-methyl adenosine
  modified_base 79: mod_base = OTHER; note = 2'-O-methyl guanosine
  modified_base 80: mod_base = OTHER; note = 2'-O-methyl uridine
  modified_base 81: mod_base = OTHER; note = 2'-O-methyl guanosine
  modified_base 82: mod_base = OTHER; note = 2'-O-methyl guanosine
  modified_base 83: mod_base = OTHER; note = 2'-O-methyl cytidine
  modified_base 84: mod_base = OTHER; note = 2'-O-methyl adenosine
  modified_base 85: mod_base = OTHER; note = 2'-O-methyl cytidine
  modified_base 86: mod_base = OTHER; note = 2'-O-methyl cytidine
  modified_base 87: mod_base = OTHER; note = 2'-O-methyl guanosine
  modified_base 88: mod_base = OTHER; note = 2'-O-methyl adenosine
  modified_base 89: mod_base = OTHER; note = 2'-O-methyl guanosine
  modified_base 90: mod_base = OTHER; note = 2'-O-methyl uridine
  modified_base 91: mod_base = OTHER; note = 2'-O-methyl cytidine
  modified_base 92: mod_base = OTHER; note = 2'-O-methyl guanosine
  modified_base 93: mod_base = OTHER; note = 2'-O-methyl guanosine
  modified_base 94: mod_base = OTHER; note = 2'-O-methyl uridine
  modified_base 95: mod_base = OTHER; note = 2'-O-methyl guanosine
  modified_base 96: mod_base = OTHER; note = 2'-O-methyl cytidine
  modified_base 118: mod_base = OTHER; note = cytidine phosphorothioate
  modified_base 119: mod_base = OTHER; note = 2'-O-methyl uridine phosphorothioate
  modified_base 120: mod_base = OTHER; note = 2'-O-methyl guanosine phosphorothioate
  modified_base 121: mod_base = OTHER; note = 2'-O-methyl cytidine
gtaacggcagacttctcctcgttttagagctagaaatagcaagttaaaataaggctagtccgttatcaacttgaaaaagtggcaccgagtcggtgcacctgactcctgcagagaagtctgc

SEQ ID NO: 20926 - RNA, 121 nt, synthetic construct
  source 1..121: mol_type = other RNA
  modified_base 1: mod_base = OTHER; note = 2'-O-methyl guanosine phosphorothioate
  modified_base 2: mod_base = OTHER; note = 2'-O-methyl uridine phosphorothioate
  modified_base 3: mod_base = OTHER; note = 2'-O-methyl adenosine phosphorothioate
  modified_base 29: mod_base = OTHER; note = 2'-O-methyl guanosine
  modified_base 30: mod_base = OTHER; note = 2'-O-methyl cytidine
  modified_base 31: mod_base = OTHER; note = 2'-O-methyl uridine
  modified_base 32: mod_base = OTHER; note = 2'-O-methyl adenosine
  modified_base 33: mod_base = OTHER; note = 2'-O-methyl guanosine
  modified_base 34: mod_base = OTHER; note = 2'-O-methyl adenosine
  modified_base 35: mod_base = OTHER; note = 2'-O-methyl adenosine
  modified_base 36: mod_base = OTHER; note = 2'-O-methyl adenosine
  modified_base 37: mod_base = OTHER; note = 2'-O-methyl uridine
  modified_base 38: mod_base = OTHER; note = 2'-O-methyl adenosine
  modified_base 39: mod_base = OTHER; note = 2'-O-methyl guanosine
  modified_base 40: mod_base = OTHER; note = 2'-O-methyl cytidine
  modified_base 69: mod_base = OTHER; note = 2'-O-methyl adenosine
  modified_base 70: mod_base = OTHER; note = 2'-O-methyl cytidine
  modified_base 71: mod_base = OTHER; note = 2'-O-methyl uridine
  modified_base 72: mod_base = OTHER; note = 2'-O-methyl uridine
  modified_base 73: mod_base = OTHER; note = 2'-O-methyl guanosine
  modified_base 74: mod_base = OTHER; note = 2'-O-methyl adenosine
  modified_base 75: mod_base = OTHER; note = 2'-O-methyl adenosine
  modified_base 76: mod_base = OTHER; note = 2'-O-methyl adenosine
  modified_base 77: mod_base = OTHER; note = 2'-O-methyl adenosine
  modified_base 78: mod_base = OTHER; note = 2'-O-methyl adenosine
  modified_base 79: mod_base = OTHER; note = 2'-O-methyl guanosine
  modified_base 80: mod_base = OTHER; note = 2'-O-methyl uridine
  modified_base 81: mod_base = OTHER; note = 2'-O-methyl guanosine
  modified_base 82: mod_base = OTHER; note = 2'-O-methyl guanosine
  modified_base 83: mod_base = OTHER; note = 2'-O-methyl cytidine
  modified_base 84: mod_base = OTHER; note = 2'-O-methyl adenosine
  modified_base 85: mod_base = OTHER; note = 2'-O-methyl cytidine
  modified_base 86: mod_base = OTHER; note = 2'-O-methyl cytidine
  modified_base 87: mod_base = OTHER; note = 2'-O-methyl guanosine
  modified_base 88: mod_base = OTHER; note = 2'-O-methyl adenosine
  modified_base 89: mod_base = OTHER; note = 2'-O-methyl guanosine
  modified_base 90: mod_base = OTHER; note = 2'-O-methyl uridine
  modified_base 91: mod_base = OTHER; note = 2'-O-methyl cytidine
  modified_base 92: mod_base = OTHER; note = 2'-O-methyl guanosine
  modified_base 93: mod_base = OTHER; note = 2'-O-methyl guanosine
  modified_base 94: mod_base = OTHER; note = 2'-O-methyl uridine
  modified_base 95: mod_base = OTHER; note = 2'-O-methyl guanosine
  modified_base 96: mod_base = OTHER; note = 2'-O-methyl cytidine
  modified_base 118: mod_base = OTHER; note = cytidine phosphorothioate
  modified_base 119: mod_base = OTHER; note = 2'-O-methyl uridine phosphorothioate
  modified_base 120: mod_base = OTHER; note = 2'-O-methyl guanosine phosphorothioate
  modified_base 121: mod_base = OTHER; note = 2'-O-methyl cytidine
gtaacggcagacttctcctcgttttagagctagaaatagcaagttaaaataaggctagtccgttatcaacttgaaaaagtggcaccgagtcggtgcacctgactcctgctgagaagtctgc

SEQ ID NO: 20927 - RNA, 121 nt, synthetic construct
  source 1..121: mol_type = other RNA
  modified_base 1: mod_base = OTHER; note = 2'-O-methyl guanosine phosphorothioate
  modified_base 2: mod_base = OTHER; note = 2'-O-methyl uridine phosphorothioate
  modified_base 3: mod_base = OTHER; note = 2'-O-methyl adenosine phosphorothioate
  modified_base 29: mod_base = OTHER; note = 2'-O-methyl guanosine
  modified_base 30: mod_base = OTHER; note = 2'-O-methyl cytidine
  modified_base 31: mod_base = OTHER; note = 2'-O-methyl uridine
  modified_base 32: mod_base = OTHER; note = 2'-O-methyl adenosine
  modified_base 33: mod_base = OTHER; note = 2'-O-methyl guanosine
  modified_base 34: mod_base = OTHER; note = 2'-O-methyl adenosine
  modified_base 35: mod_base = OTHER; note = 2'-O-methyl adenosine
  modified_base 36: mod_base = OTHER; note = 2'-O-methyl adenosine
  modified_base 37: mod_base = OTHER; note = 2'-O-methyl uridine
  modified_base 38: mod_base = OTHER; note = 2'-O-methyl adenosine
  modified_base 39: mod_base = OTHER; note = 2'-O-methyl guanosine
  modified_base 40: mod_base = OTHER; note = 2'-O-methyl cytidine
  modified_base 69: mod_base = OTHER; note = 2'-O-methyl adenosine
  modified_base 70: mod_base = OTHER; note = 2'-O-methyl cytidine
  modified_base 71: mod_base = OTHER; note = 2'-O-methyl uridine
  modified_base 72: mod_base = OTHER; note = 2'-O-methyl uridine
  modified_base 73: mod_base = OTHER; note = 2'-O-methyl guanosine
  modified_base 74: mod_base = OTHER; note = 2'-O-methyl adenosine
  modified_base 75: mod_base = OTHER; note = 2'-O-methyl adenosine
  modified_base 76: mod_base = OTHER; note = 2'-O-methyl adenosine
  modified_base 77: mod_base = OTHER; note = 2'-O-methyl adenosine
  modified_base 78: mod_base = OTHER; note = 2'-O-methyl adenosine
  modified_base 79: mod_base = OTHER; note = 2'-O-methyl guanosine
  modified_base 80: mod_base = OTHER; note = 2'-O-methyl uridine
  modified_base 81: mod_base = OTHER; note = 2'-O-methyl guanosine
  modified_base 82: mod_base = OTHER; note = 2'-O-methyl guanosine
  modified_base 83: mod_base = OTHER; note = 2'-O-methyl cytidine
  modified_base 84: mod_base = OTHER; note = 2'-O-methyl adenosine
  modified_base 85: mod_base = OTHER; note = 2'-O-methyl cytidine
  modified_base 86: mod_base = OTHER; note = 2'-O-methyl cytidine
  modified_base 87: mod_base = OTHER; note = 2'-O-methyl guanosine
  modified_base 88: mod_base = OTHER; note = 2'-O-methyl adenosine
  modified_base 89: mod_base = OTHER; note = 2'-O-methyl guanosine
  modified_base 90: mod_base = OTHER; note = 2'-O-methyl uridine
  modified_base 91: mod_base = OTHER; note = 2'-O-methyl cytidine
  modified_base 92: mod_base = OTHER; note = 2'-O-methyl guanosine
  modified_base 93: mod_base = OTHER; note = 2'-O-methyl guanosine
  modified_base 94: mod_base = OTHER; note = 2'-O-methyl uridine
  modified_base 95: mod_base = OTHER; note = 2'-O-methyl guanosine
  modified_base 96: mod_base = OTHER; note = 2'-O-methyl cytidine
  modified_base 118: mod_base = OTHER; note = cytidine phosphorothioate
  modified_base 119: mod_base = OTHER; note = 2'-O-methyl uridine phosphorothioate
  modified_base 120: mod_base = OTHER; note = 2'-O-methyl guanosine phosphorothioate
  modified_base 121: mod_base = OTHER; note = 2'-O-methyl cytidine
gtaacggcagacttctcctcgttttagagctagaaatagcaagttaaaataaggctagtccgttatcaacttgaaaaagtggcaccgagtcggtgcacctgactcctgccgagaagtctgc

SEQ ID NO: 20928 - RNA, 121 nt, synthetic construct
  source 1..121: mol_type = other RNA
  modified_base 1: mod_base = OTHER; note = 2'-O-methyl guanosine phosphorothioate
  modified_base 2: mod_base = OTHER; note = 2'-O-methyl uridine phosphorothioate
  modified_base 3: mod_base = OTHER; note = 2'-O-methyl adenosine phosphorothioate
  modified_base 29: mod_base = OTHER; note = 2'-O-methyl guanosine
  modified_base 30: mod_base = OTHER; note = 2'-O-methyl cytidine
  modified_base 31: mod_base = OTHER; note = 2'-O-methyl uridine
  modified_base 32: mod_base = OTHER; note = 2'-O-methyl adenosine
  modified_base 33: mod_base = OTHER; note = 2'-O-methyl guanosine
  modified_base 34: mod_base = OTHER; note = 2'-O-methyl adenosine
  modified_base 35: mod_base = OTHER; note = 2'-O-methyl adenosine
  modified_base 36: mod_base = OTHER; note = 2'-O-methyl adenosine
  modified_base 37: mod_base = OTHER; note = 2'-O-methyl uridine
  modified_base 38: mod_base = OTHER; note = 2'-O-methyl adenosine
  modified_base 39: mod_base = OTHER; note = 2'-O-methyl guanosine
  modified_base 40: mod_base = OTHER; note = 2'-O-methyl cytidine
  modified_base 69: mod_base = OTHER; note = 2'-O-methyl adenosine
  modified_base 70: mod_base = OTHER; note = 2'-O-methyl cytidine
  modified_base 71: mod_base = OTHER; note = 2'-O-methyl uridine
  modified_base 72: mod_base = OTHER; note = 2'-O-methyl uridine
  modified_base 73: mod_base = OTHER; note = 2'-O-methyl guanosine
  modified_base 74: mod_base = OTHER; note = 2'-O-methyl adenosine
  modified_base 75: mod_base = OTHER; note = 2'-O-methyl adenosine
  modified_base 76: mod_base = OTHER; note = 2'-O-methyl adenosine
  modified_base 77: mod_base = OTHER; note = 2'-O-methyl adenosine
  modified_base 78: mod_base = OTHER; note = 2'-O-methyl adenosine
  modified_base 79: mod_base = OTHER; note = 2'-O-methyl guanosine
  modified_base 80: mod_base = OTHER; note = 2'-O-methyl uridine
  modified_base 81: mod_base = OTHER; note = 2'-O-methyl guanosine
  modified_base 82: mod_base = OTHER; note = 2'-O-methyl guanosine
  modified_base 83: mod_base = OTHER; note = 2'-O-methyl cytidine
  modified_base 84: mod_base = OTHER; note = 2'-O-methyl adenosine
  modified_base 85: mod_base = OTHER; note = 2'-O-methyl cytidine
  modified_base 86: mod_base = OTHER; note = 2'-O-methyl cytidine
  modified_base 87: mod_base = OTHER; note = 2'-O-methyl guanosine
  modified_base 88: mod_base = OTHER; note = 2'-O-methyl adenosine
  modified_base 89: mod_base = OTHER; note = 2'-O-methyl guanosine
  modified_base 90: mod_base = OTHER; note = 2'-O-methyl uridine
  modified_base 91: mod_base = OTHER; note = 2'-O-methyl cytidine
  modified_base 92: mod_base = OTHER; note = 2'-O-methyl guanosine
  modified_base 93: mod_base = OTHER; note = 2'-O-methyl guanosine
  modified_base 94: mod_base = OTHER; note = 2'-O-methyl uridine
  modified_base 95: mod_base = OTHER; note = 2'-O-methyl guanosine
  modified_base 96: mod_base = OTHER; note = 2'-O-methyl cytidine
  modified_base 118: mod_base = OTHER; note = cytidine phosphorothioate
  modified_base 119: mod_base = OTHER; note = 2'-O-methyl uridine phosphorothioate
  modified_base 120: mod_base = OTHER; note = 2'-O-methyl guanosine phosphorothioate
  modified_base 121: mod_base = OTHER; note = 2'-O-methyl cytidine
gtaacggcagacttctcctcgttttagagctagaaatagcaagttaaaataaggctagtccgttatcaacttgaaaaagtggcaccgagtcggtgcacctgactcccgcagagaagtctgc

SEQ ID NO: 20929 - RNA, 121 nt, synthetic construct
  source 1..121: mol_type = other RNA
  modified_base 1: mod_base = OTHER; note = 2'-O-methyl guanosine phosphorothioate
  modified_base 2: mod_base = OTHER; note = 2'-O-methyl uridine phosphorothioate
  modified_base 3: mod_base = OTHER; note = 2'-O-methyl adenosine phosphorothioate
  modified_base 29: mod_base = OTHER; note = 2'-O-methyl guanosine
  modified_base 30: mod_base = OTHER; note = 2'-O-methyl cytidine
  modified_base 31: mod_base = OTHER; note = 2'-O-methyl uridine
  modified_base 32: mod_base = OTHER; note = 2'-O-methyl adenosine
  modified_base 33: mod_base = OTHER; note = 2'-O-methyl guanosine
  modified_base 34: mod_base = OTHER; note = 2'-O-methyl adenosine
  modified_base 35: mod_base = OTHER; note = 2'-O-methyl adenosine
  modified_base 36: mod_base = OTHER; note = 2'-O-methyl adenosine
  modified_base 37: mod_base = OTHER; note = 2'-O-methyl uridine
  modified_base 38: mod_base = OTHER; note = 2'-O-methyl adenosine
  modified_base 39: mod_base = OTHER; note = 2'-O-methyl guanosine
  modified_base 40: mod_base = OTHER; note = 2'-O-methyl cytidine
  modified_base 69: mod_base = OTHER; note = 2'-O-methyl adenosine
  modified_base 70: mod_base = OTHER; note = 2'-O-methyl cytidine
  modified_base 71: mod_base = OTHER; note = 2'-O-methyl uridine
  modified_base 72: mod_base = OTHER; note = 2'-O-methyl uridine
  modified_base 73: mod_base = OTHER; note = 2'-O-methyl guanosine
  modified_base 74: mod_base = OTHER; note = 2'-O-methyl adenosine
  modified_base 75: mod_base = OTHER; note = 2'-O-methyl adenosine
  modified_base 76: mod_base = OTHER; note = 2'-O-methyl adenosine
  modified_base 77: mod_base = OTHER; note = 2'-O-methyl adenosine
  modified_base 78: mod_base = OTHER; note = 2'-O-methyl adenosine
  modified_base 79: mod_base = OTHER; note = 2'-O-methyl guanosine
  modified_base 80: mod_base = OTHER; note = 2'-O-methyl uridine
  modified_base 81: mod_base = OTHER; note = 2'-O-methyl guanosine
  modified_base 82: mod_base = OTHER; note = 2'-O-methyl guanosine
  modified_base 83: mod_base = OTHER; note = 2'-O-methyl cytidine
  modified_base 84: mod_base = OTHER; note = 2'-O-methyl adenosine
  modified_base 85: mod_base = OTHER; note = 2'-O-methyl cytidine
  modified_base 86: mod_base = OTHER; note = 2'-O-methyl cytidine
  modified_base 87: mod_base = OTHER; note = 2'-O-methyl guanosine
  modified_base 88: mod_base = OTHER; note = 2'-O-methyl adenosine
  modified_base 89: mod_base = OTHER; note = 2'-O-methyl guanosine
  modified_base 90: mod_base = OTHER; note = 2'-O-methyl uridine
  modified_base 91: mod_base = OTHER; note = 2'-O-methyl cytidine
  modified_base 92: mod_base = OTHER; note = 2'-O-methyl guanosine
  modified_base 93: mod_base = OTHER; note = 2'-O-methyl guanosine
  modified_base 94: mod_base = OTHER; note = 2'-O-methyl uridine
  modified_base 95: mod_base = OTHER; note = 2'-O-methyl guanosine
  modified_base 96: mod_base = OTHER; note = 2'-O-methyl cytidine
  modified_base 118: mod_base = OTHER; note = cytidine phosphorothioate
  modified_base 119: mod_base = OTHER; note = 2'-O-methyl uridine phosphorothioate
  modified_base 120: mod_base = OTHER; note = 2'-O-methyl guanosine phosphorothioate
  modified_base 121: mod_base = OTHER; note = 2'-O-methyl cytidine
gtaacggcagacttctcctcgttttagagctagaaatagcaagttaaaataaggctagtccgttatcaacttgaaaaagtggcaccgagtcggtgcacctgactccagcagagaagtctgc

SEQ ID NO: 20930 - RNA, 121 nt, synthetic construct
  source 1..121: mol_type = other RNA
  modified_base 1: mod_base = OTHER; note = 2'-O-methyl guanosine phosphorothioate
  modified_base 2: mod_base = OTHER; note = 2'-O-methyl uridine phosphorothioate
  modified_base 3: mod_base = OTHER; note = 2'-O-methyl adenosine phosphorothioate
  modified_base 29: mod_base = OTHER; note = 2'-O-methyl guanosine
  modified_base 30: mod_base = OTHER; note = 2'-O-methyl cytidine
  modified_base 31: mod_base = OTHER; note = 2'-O-methyl uridine
  modified_base 32: mod_base = OTHER; note = 2'-O-methyl adenosine
  modified_base 33: mod_base = OTHER; note = 2'-O-methyl guanosine
  modified_base 34: mod_base = OTHER; note = 2'-O-methyl adenosine
  modified_base 35: mod_base = OTHER; note = 2'-O-methyl adenosine
  modified_base 36: mod_base = OTHER; note = 2'-O-methyl adenosine
  modified_base 37: mod_base = OTHER; note = 2'-O-methyl uridine
  modified_base 38: mod_base = OTHER; note = 2'-O-methyl adenosine
  modified_base 39: mod_base = OTHER; note = 2'-O-methyl guanosine
  modified_base 40: mod_base = OTHER; note = 2'-O-methyl cytidine
  modified_base 69: mod_base = OTHER; note = 2'-O-methyl adenosine
  modified_base 70: mod_base = OTHER; note = 2'-O-methyl cytidine
  modified_base 71: mod_base = OTHER; note = 2'-O-methyl uridine
  modified_base 72: mod_base = OTHER; note = 2'-O-methyl uridine
  modified_base 73: mod_base = OTHER; note = 2'-O-methyl guanosine
  modified_base 74: mod_base = OTHER; note = 2'-O-methyl adenosine
  modified_base 75: mod_base = OTHER; note = 2'-O-methyl adenosine
  modified_base 76: mod_base = OTHER; note = 2'-O-methyl adenosine
  modified_base 77: mod_base = OTHER; note = 2'-O-methyl adenosine
  modified_base 78: mod_base = OTHER; note = 2'-O-methyl adenosine
  modified_base 79: mod_base = OTHER; note = 2'-O-methyl guanosine
  modified_base 80: mod_base = OTHER; note = 2'-O-methyl uridine
  modified_base 81: mod_base = OTHER; note = 2'-O-methyl guanosine
  modified_base 82: mod_base = OTHER; note = 2'-O-methyl guanosine
  modified_base 83: mod_base = OTHER; note = 2'-O-methyl cytidine
  modified_base 84: mod_base = OTHER; note = 2'-O-methyl adenosine
  modified_base 85: mod_base = OTHER; note = 2'-O-methyl cytidine
  modified_base 86: mod_base = OTHER; note = 2'-O-methyl cytidine
  modified_base 87: mod_base = OTHER; note = 2'-O-methyl guanosine
  modified_base 88: mod_base = OTHER; note = 2'-O-methyl adenosine
  modified_base 89: mod_base = OTHER; note = 2'-O-methyl guanosine
  modified_base 90: mod_base = OTHER; note = 2'-O-methyl uridine
  modified_base 91: mod_base = OTHER; note = 2'-O-methyl cytidine
  modified_base 92: mod_base = OTHER; note = 2'-O-methyl guanosine
  modified_base 93: mod_base = OTHER; note = 2'-O-methyl guanosine
  modified_base 94: mod_base = OTHER; note = 2'-O-methyl uridine
  modified_base 95: mod_base = OTHER; note = 2'-O-methyl guanosine
  modified_base 96: mod_base = OTHER; note = 2'-O-methyl cytidine
  modified_base 118: mod_base = OTHER; note = cytidine phosphorothioate
  modified_base 119: mod_base = OTHER; note = 2'-O-methyl uridine phosphorothioate
  modified_base 120: mod_base = OTHER; note = 2'-O-methyl guanosine phosphorothioate
  modified_base 121: mod_base = OTHER; note = 2'-O-methyl cytidine
gtaacggcagacttctcctcgttttagagctagaaatagcaagttaaaataaggctagtccgttatcaacttgaaaaagtggcaccgagtcggtgcacctgactccggcagagaagtctgc

SEQ ID NO: 20931 - RNA, 121 nt, synthetic construct
  source 1..121: mol_type = other RNA
  modified_base 1: mod_base = OTHER; note = 2'-O-methyl guanosine phosphorothioate
  modified_base 2: mod_base = OTHER; note = 2'-O-methyl uridine phosphorothioate
  modified_base 3: mod_base = OTHER; note = 2'-O-methyl adenosine phosphorothioate
  modified_base 29: mod_base = OTHER; note = 2'-O-methyl guanosine
  modified_base 30: mod_base = OTHER; note = 2'-O-methyl cytidine
  modified_base 31: mod_base = OTHER; note = 2'-O-methyl uridine
  modified_base 32: mod_base = OTHER; note = 2'-O-methyl adenosine
  modified_base 33: mod_base = OTHER; note = 2'-O-methyl guanosine
  modified_base 34: mod_base = OTHER; note = 2'-O-methyl adenosine
  modified_base 35: mod_base = OTHER; note = 2'-O-methyl adenosine
  modified_base 36: mod_base = OTHER; note = 2'-O-methyl adenosine
  modified_base 37: mod_base = OTHER; note = 2'-O-methyl uridine
  modified_base 38: mod_base = OTHER; note = 2'-O-methyl adenosine
  modified_base 39: mod_base = OTHER; note = 2'-O-methyl guanosine
  modified_base 40: mod_base = OTHER; note = 2'-O-methyl cytidine
  modified_base 69: mod_base = OTHER; note = 2'-O-methyl adenosine
  modified_base 70: mod_base = OTHER; note = 2'-O-methyl cytidine
  modified_base 71: mod_base = OTHER; note = 2'-O-methyl uridine
  modified_base 72: mod_base = OTHER; note = 2'-O-methyl uridine
  modified_base 73: mod_base = OTHER; note = 2'-O-methyl guanosine
  modified_base 74: mod_base = OTHER; note = 2'-O-methyl adenosine
  modified_base 75: mod_base = OTHER; note = 2'-O-methyl adenosine
  modified_base 76: mod_base = OTHER; note = 2'-O-methyl adenosine
  modified_base 77: mod_base = OTHER; note = 2'-O-methyl adenosine
  modified_base 78: mod_base = OTHER; note = 2'-O-methyl adenosine
  modified_base 79: mod_base = OTHER; note = 2'-O-methyl guanosine
  modified_base 80: mod_base = OTHER; note = 2'-O-methyl uridine
  modified_base 81: mod_base = OTHER; note = 2'-O-methyl guanosine
  modified_base 82: mod_base = OTHER; note = 2'-O-methyl guanosine
  modified_base 83: mod_base = OTHER; note = 2'-O-methyl cytidine
  modified_base 84: mod_base = OTHER; note = 2'-O-methyl adenosine
  modified_base 85: mod_base = OTHER; note = 2'-O-methyl cytidine
  modified_base 86: mod_base = OTHER; note = 2'-O-methyl cytidine
  modified_base 87: mod_base = OTHER; note = 2'-O-methyl guanosine
  modified_base 88: mod_base = OTHER; note = 2'-O-methyl adenosine
  modified_base 89: mod_base = OTHER; note = 2'-O-methyl guanosine
  modified_base 90: mod_base = OTHER; note = 2'-O-methyl uridine
  modified_base 91: mod_base = OTHER; note = 2'-O-methyl cytidine
  modified_base 92: mod_base = OTHER; note = 2'-O-methyl guanosine
  modified_base 93: mod_base = OTHER; note = 2'-O-methyl guanosine
  modified_base 94: mod_base = OTHER; note = 2'-O-methyl uridine
  modified_base 95: mod_base = OTHER; note = 2'-O-methyl guanosine
  modified_base 96: mod_base = OTHER; note = 2'-O-methyl cytidine
  modified_base 118: mod_base = OTHER; note = cytidine phosphorothioate
  modified_base 119: mod_base = OTHER; note = 2'-O-methyl uridine phosphorothioate
  modified_base 120: mod_base = OTHER; note = 2'-O-methyl guanosine phosphorothioate
  modified_base 121: mod_base = OTHER; note = 2'-O-methyl cytidine
gtaacggcagacttctcctcgttttagagctagaaatagcaagttaaaataaggctagtccgttatcaacttgaaaaagtggcaccgagtcggtgcacctgactcccgctgagaagtctgc

SEQ ID NO: 20932 - RNA, 121 nt, synthetic construct
  source 1..121: mol_type = other RNA
  modified_base 1: mod_base = OTHER; note = 2'-O-methyl guanosine phosphorothioate
  modified_base 2: mod_base = OTHER; note = 2'-O-methyl uridine phosphorothioate
  modified_base 3: mod_base = OTHER; note = 2'-O-methyl adenosine phosphorothioate
  modified_base 29: mod_base = OTHER; note = 2'-O-methyl guanosine
  modified_base 30: mod_base = OTHER; note = 2'-O-methyl cytidine
  modified_base 31: mod_base = OTHER; note = 2'-O-methyl uridine
  modified_base 32: mod_base = OTHER; note = 2'-O-methyl adenosine
  modified_base 33: mod_base = OTHER; note = 2'-O-methyl guanosine
  modified_base 34: mod_base = OTHER; note = 2'-O-methyl adenosine
  modified_base 35: mod_base = OTHER; note = 2'-O-methyl adenosine
  modified_base 36: mod_base = OTHER; note = 2'-O-methyl adenosine
  modified_base 37: mod_base = OTHER; note = 2'-O-methyl uridine
  modified_base 38: mod_base = OTHER; note = 2'-O-methyl adenosine
  modified_base 39: mod_base = OTHER; note = 2'-O-methyl guanosine
  modified_base 40: mod_base = OTHER; note = 2'-O-methyl cytidine
  modified_base 69: mod_base = OTHER; note = 2'-O-methyl adenosine
  modified_base 70: mod_base = OTHER; note = 2'-O-methyl cytidine
  modified_base 71: mod_base = OTHER; note = 2'-O-methyl uridine
  modified_base 72: mod_base = OTHER; note = 2'-O-methyl uridine
  modified_base 73: mod_base = OTHER; note = 2'-O-methyl guanosine
  modified_base 74: mod_base = OTHER; note = 2'-O-methyl adenosine
  modified_base 75: mod_base = OTHER; note = 2'-O-methyl adenosine
  modified_base 76: mod_base = OTHER; note = 2'-O-methyl adenosine
  modified_base 77: mod_base = OTHER; note = 2'-O-methyl adenosine
  modified_base 78: mod_base = OTHER; note = 2'-O-methyl adenosine
  modified_base 79: mod_base = OTHER; note = 2'-O-methyl guanosine
  modified_base 80: mod_base = OTHER; note = 2'-O-methyl uridine
  modified_base 81: mod_base = OTHER; note = 2'-O-methyl guanosine
  modified_base 82: mod_base = OTHER; note = 2'-O-methyl guanosine
  modified_base 83: mod_base = OTHER; note = 2'-O-methyl cytidine
  modified_base 84: mod_base = OTHER; note = 2'-O-methyl adenosine
  modified_base 85: mod_base = OTHER; note = 2'-O-methyl cytidine
  modified_base 86: mod_base = OTHER; note = 2'-O-methyl cytidine
  modified_base 87: mod_base = OTHER; note = 2'-O-methyl guanosine
  modified_base 88: mod_base = OTHER; note = 2'-O-methyl adenosine
  modified_base 89: mod_base = OTHER; note = 2'-O-methyl guanosine
  modified_base 90: mod_base = OTHER; note = 2'-O-methyl uridine
  modified_base 91: mod_base = OTHER; note = 2'-O-methyl cytidine
  modified_base 92: mod_base = OTHER; note = 2'-O-methyl guanosine
  modified_base 93: mod_base = OTHER; note = 2'-O-methyl guanosine
  modified_base 94: mod_base = OTHER; note = 2'-O-methyl uridine
  modified_base 95: mod_base = OTHER; note = 2'-O-methyl guanosine
  modified_base 96: mod_base = OTHER; note = 2'-O-methyl cytidine
  modified_base 118: mod_base = OTHER; note = cytidine phosphorothioate
  modified_base 119: mod_base = OTHER; note = 2'-O-methyl uridine phosphorothioate
  modified_base 120: mod_base = OTHER; note = 2'-O-methyl guanosine phosphorothioate
  modified_base 121: mod_base = OTHER; note = 2'-O-methyl cytidine
gtaacggcagacttctcctcgttttagagctagaaatagcaagttaaaataaggctagtccgttatcaacttgaaaaagtggcaccgagtcggtgcacctgactccagctgagaagtctgc

SEQ ID NO: 20933 - RNA, 121 nt, synthetic construct
  source 1..121: mol_type = other RNA
  modified_base 1: mod_base = OTHER; note = 2'-O-methyl guanosine phosphorothioate
  modified_base 2: mod_base = OTHER; note = 2'-O-methyl uridine phosphorothioate
  modified_base 3: mod_base = OTHER; note = 2'-O-methyl adenosine phosphorothioate
  modified_base 29: mod_base = OTHER; note = 2'-O-methyl guanosine
  modified_base 30: mod_base = OTHER; note = 2'-O-methyl cytidine
  modified_base 31: mod_base = OTHER; note = 2'-O-methyl uridine
  modified_base 32: mod_base = OTHER; note = 2'-O-methyl adenosine
  modified_base 33: mod_base = OTHER; note = 2'-O-methyl guanosine
  modified_base 34: mod_base = OTHER; note = 2'-O-methyl adenosine
  modified_base 35: mod_base = OTHER; note = 2'-O-methyl adenosine
  modified_base 36: mod_base = OTHER; note = 2'-O-methyl adenosine
  modified_base 37: mod_base = OTHER; note = 2'-O-methyl uridine
  modified_base 38: mod_base = OTHER; note = 2'-O-methyl adenosine
  modified_base 39: mod_base = OTHER; note = 2'-O-methyl guanosine
  modified_base 40: mod_base = OTHER; note = 2'-O-methyl cytidine
  modified_base 69: mod_base = OTHER; note = 2'-O-methyl adenosine
  modified_base 70: mod_base = OTHER; note = 2'-O-methyl cytidine
  modified_base 71: mod_base = OTHER; note = 2'-O-methyl uridine
  modified_base 72: mod_base = OTHER; note = 2'-O-methyl uridine
  modified_base 73: mod_base = OTHER; note = 2'-O-methyl guanosine
  modified_base 74: mod_base = OTHER; note = 2'-O-methyl adenosine
  modified_base 75: mod_base = OTHER; note = 2'-O-methyl adenosine
  modified_base 76: mod_base = OTHER; note = 2'-O-methyl adenosine
  modified_base 77: mod_base = OTHER; note = 2'-O-methyl adenosine
  modified_base 78: mod_base = OTHER; note = 2'-O-methyl adenosine
  modified_base 79: mod_base = OTHER; note = 2'-O-methyl guanosine
  modified_base 80: mod_base = OTHER; note = 2'-O-methyl uridine
  modified_base 81: mod_base = OTHER; note = 2'-O-methyl guanosine
  modified_base 82: mod_base = OTHER; note = 2'-O-methyl guanosine
  modified_base 83: mod_base = OTHER; note = 2'-O-methyl cytidine
  modified_base 84: mod_base = OTHER; note = 2'-O-methyl adenosine
  modified_base 85: mod_base = OTHER; note = 2'-O-methyl cytidine
  modified_base 86: mod_base = OTHER; note = 2'-O-methyl cytidine
  modified_base 87: mod_base = OTHER; note = 2'-O-methyl guanosine
  modified_base 88: mod_base = OTHER; note = 2'-O-methyl adenosine
  modified_base 89: mod_base = OTHER; note = 2'-O-methyl guanosine
  modified_base 90: mod_base = OTHER; note = 2'-O-methyl uridine
  modified_base 91: mod_base = OTHER; note = 2'-O-methyl cytidine
  modified_base 92: mod_base = OTHER; note = 2'-O-methyl guanosine
  modified_base 93: mod_base = OTHER; note = 2'-O-methyl guanosine
  modified_base 94: mod_base = OTHER; note = 2'-O-methyl uridine
  modified_base 95: mod_base = OTHER; note = 2'-O-methyl guanosine
  modified_base 96: mod_base = OTHER; note = 2'-O-methyl cytidine
  modified_base 118: mod_base = OTHER; note = cytidine phosphorothioate
  modified_base 119: mod_base = OTHER; note = 2'-O-methyl uridine phosphorothioate
  modified_base 120: mod_base = OTHER; note = 2'-O-methyl guanosine phosphorothioate
  modified_base 121: mod_base = OTHER; note = 2'-O-methyl cytidine
gtaacggcagacttctcctcgttttagagctagaaatagcaagttaaaataaggctagtccgttatcaacttgaaaaagtggcaccgagtcggtgcacctgactccggctgagaagtctgc

SEQ ID NO: 20934 - RNA, 121 nt, synthetic construct
  source 1..121: mol_type = other RNA
  modified_base 1: mod_base = OTHER; note = 2'-O-methyl guanosine phosphorothioate
  modified_base 2: mod_base = OTHER; note = 2'-O-methyl uridine phosphorothioate
  modified_base 3: mod_base = OTHER; note = 2'-O-methyl adenosine phosphorothioate
  modified_base 29: mod_base = OTHER; note = 2'-O-methyl guanosine
  modified_base 30: mod_base = OTHER; note = 2'-O-methyl cytidine
  modified_base 31: mod_base = OTHER; note = 2'-O-methyl uridine
  modified_base 32: mod_base = OTHER; note = 2'-O-methyl adenosine
  modified_base 33: mod_base = OTHER; note = 2'-O-methyl guanosine
  modified_base 34: mod_base = OTHER; note = 2'-O-methyl adenosine
  modified_base 35: mod_base = OTHER; note = 2'-O-methyl adenosine
  modified_base 36: mod_base = OTHER; note = 2'-O-methyl adenosine
  modified_base 37: mod_base = OTHER; note = 2'-O-methyl uridine
  modified_base 38: mod_base = OTHER; note = 2'-O-methyl adenosine
  modified_base 39: mod_base = OTHER; note = 2'-O-methyl guanosine
  modified_base 40: mod_base = OTHER; note = 2'-O-methyl cytidine
  modified_base 69: mod_base = OTHER; note = 2'-O-methyl adenosine
  modified_base 70: mod_base = OTHER; note = 2'-O-methyl cytidine
  modified_base 71: mod_base = OTHER; note = 2'-O-methyl uridine
  modified_base 72: mod_base = OTHER; note = 2'-O-methyl uridine
  modified_base 73: mod_base = OTHER; note = 2'-O-methyl guanosine
  modified_base 74: mod_base = OTHER; note = 2'-O-methyl adenosine
  modified_base 75: mod_base = OTHER; note = 2'-O-methyl adenosine
  modified_base 76: mod_base = OTHER; note = 2'-O-methyl adenosine
  modified_base 77: mod_base = OTHER; note = 2'-O-methyl adenosine
  modified_base 78: mod_base = OTHER; note = 2'-O-methyl adenosine
  modified_base 79: mod_base = OTHER; note = 2'-O-methyl guanosine
  modified_base 80: mod_base = OTHER; note = 2'-O-methyl uridine
  modified_base 81: mod_base = OTHER; note = 2'-O-methyl guanosine
  modified_base 82: mod_base = OTHER; note = 2'-O-methyl guanosine
  modified_base 83: mod_base = OTHER; note = 2'-O-methyl cytidine
  modified_base 84: mod_base = OTHER; note = 2'-O-methyl adenosine
  modified_base 85: mod_base = OTHER; note = 2'-O-methyl cytidine
  modified_base 86: mod_base = OTHER; note = 2'-O-methyl cytidine
  modified_base 87: mod_base = OTHER; note = 2'-O-methyl guanosine
  modified_base 88: mod_base = OTHER; note = 2'-O-methyl adenosine
  modified_base 89: mod_base = OTHER; note = 2'-O-methyl guanosine
  modified_base 90: mod_base = OTHER; note = 2'-O-methyl uridine
  modified_base 91: mod_base = OTHER; note = 2'-O-methyl cytidine
  modified_base 92: mod_base = OTHER; note = 2'-O-methyl guanosine
  modified_base 93: mod_base = OTHER; note = 2'-O-methyl guanosine
  modified_base 94: mod_base = OTHER; note = 2'-O-methyl uridine
  modified_base 95: mod_base = OTHER; note = 2'-O-methyl guanosine
  modified_base 96: mod_base = OTHER; note = 2'-O-methyl cytidine
  modified_base 118: mod_base = OTHER; note = cytidine phosphorothioate
  modified_base 119: mod_base = OTHER; note = 2'-O-methyl uridine phosphorothioate
  modified_base 120: mod_base = OTHER; note = 2'-O-methyl guanosine phosphorothioate
  modified_base 121: mod_base = OTHER; note = 2'-O-methyl cytidine
gtaacggcagacttctcctcgttttagagctagaaatagcaagttaaaataaggctagtccgttatcaacttgaaaaagtggcaccgagtcggtgcacctgactcccgccgagaagtctgc

SEQ ID NO: 20935 - RNA, 121 nt, synthetic construct
  source 1..121: mol_type = other RNA
  modified_base 1: mod_base = OTHER; note = 2'-O-methyl guanosine phosphorothioate
  modified_base 2: mod_base = OTHER; note = 2'-O-methyl uridine phosphorothioate
  modified_base 3: mod_base = OTHER; note = 2'-O-methyl adenosine phosphorothioate
  modified_base 29: mod_base = OTHER; note = 2'-O-methyl guanosine
  modified_base 30: mod_base = OTHER; note = 2'-O-methyl cytidine
  modified_base 31: mod_base = OTHER; note = 2'-O-methyl uridine
  modified_base 32: mod_base = OTHER; note = 2'-O-methyl adenosine
  modified_base 33: mod_base = OTHER; note = 2'-O-methyl guanosine
  modified_base 34: mod_base = OTHER; note = 2'-O-methyl adenosine
  modified_base 35: mod_base = OTHER; note = 2'-O-methyl adenosine
  modified_base 36: mod_base = OTHER; note = 2'-O-methyl adenosine
  modified_base 37: mod_base = OTHER; note = 2'-O-methyl uridine
  modified_base 38: mod_base = OTHER; note = 2'-O-methyl adenosine
  modified_base 39: mod_base = OTHER; note = 2'-O-methyl guanosine
  modified_base 40: mod_base = OTHER; note = 2'-O-methyl cytidine
  modified_base 69: mod_base = OTHER; note = 2'-O-methyl adenosine
  modified_base 70: mod_base = OTHER; note = 2'-O-methyl cytidine
  modified_base 71: mod_base = OTHER; note = 2'-O-methyl uridine
  modified_base 72: mod_base = OTHER; note = 2'-O-methyl uridine
  modified_base 73: mod_base = OTHER; note = 2'-O-methyl guanosine
  modified_base 74: mod_base = OTHER; note = 2'-O-methyl adenosine
  modified_base 75: mod_base = OTHER; note = 2'-O-methyl adenosine
  modified_base 76: mod_base = OTHER; note = 2'-O-methyl adenosine
  modified_base 77: mod_base = OTHER; note = 2'-O-methyl adenosine
  modified_base 78: mod_base = OTHER; note = 2'-O-methyl adenosine
  modified_base 79: mod_base = OTHER; note = 2'-O-methyl guanosine
  modified_base 80: mod_base = OTHER; note = 2'-O-methyl uridine
  modified_base 81: mod_base = OTHER; note = 2'-O-methyl guanosine
  modified_base 82: mod_base = OTHER; note = 2'-O-methyl guanosine
  modified_base 83: mod_base = OTHER; note = 2'-O-methyl cytidine
  modified_base 84: mod_base = OTHER; note = 2'-O-methyl adenosine
  modified_base 85: mod_base = OTHER; note = 2'-O-methyl cytidine
  modified_base 86: mod_base = OTHER; note = 2'-O-methyl cytidine
  modified_base 87: mod_base = OTHER; note = 2'-O-methyl guanosine
  modified_base 88: mod_base = OTHER; note = 2'-O-methyl adenosine
  modified_base 89: mod_base = OTHER; note = 2'-O-methyl guanosine
  modified_base 90: mod_base = OTHER; note = 2'-O-methyl uridine
  modified_base 91: mod_base = OTHER; note = 2'-O-methyl cytidine
  modified_base 92: mod_base = OTHER; note = 2'-O-methyl guanosine
  modified_base 93: mod_base = OTHER; note = 2'-O-methyl guanosine
  modified_base 94: mod_base = OTHER; note = 2'-O-methyl uridine
  modified_base 95: mod_base = OTHER; note = 2'-O-methyl guanosine
  modified_base 96: mod_base = OTHER; note = 2'-O-methyl cytidine
  modified_base 118: mod_base = OTHER; note = cytidine phosphorothioate
  modified_base 119: mod_base = OTHER; note = 2'-O-methyl uridine phosphorothioate
  modified_base 120: mod_base = OTHER; note = 2'-O-methyl guanosine phosphorothioate
  modified_base 121: mod_base = OTHER; note = 2'-O-methyl cytidine
gtaacggcagacttctcctcgttttagagctagaaatagcaagttaaaataaggctagtccgttatcaacttgaaaaagtggcaccgagtcggtgcacctgactccagccgagaagtctgc

SEQ ID NO: 20936 - RNA, 121 nt, synthetic construct
  source 1..121: mol_type = other RNA
  modified_base 1: mod_base = OTHER; note = 2'-O-methyl guanosine phosphorothioate
  modified_base 2: mod_base = OTHER; note = 2'-O-methyl uridine phosphorothioate
  modified_base 3: mod_base = OTHER; note = 2'-O-methyl adenosine phosphorothioate
  modified_base 29: mod_base = OTHER; note = 2'-O-methyl guanosine
  modified_base 30: mod_base = OTHER; note = 2'-O-methyl cytidine
  modified_base 31: mod_base = OTHER; note = 2'-O-methyl uridine
  modified_base 32: mod_base = OTHER; note = 2'-O-methyl adenosine
  modified_base 33: mod_base = OTHER; note = 2'-O-methyl guanosine
  modified_base 34: mod_base = OTHER; note = 2'-O-methyl adenosine
  modified_base 35: mod_base = OTHER; note = 2'-O-methyl adenosine
  modified_base 36: mod_base = OTHER; note = 2'-O-methyl adenosine
  modified_base 37: mod_base = OTHER; note = 2'-O-methyl uridine
  modified_base 38: mod_base = OTHER; note = 2'-O-methyl adenosine
  modified_base 39: mod_base = OTHER; note = 2'-O-methyl guanosine
  modified_base 40: mod_base = OTHER; note = 2'-O-methyl cytidine
  modified_base 69: mod_base = OTHER; note = 2'-O-methyl adenosine
  modified_base 70: mod_base = OTHER; note = 2'-O-methyl cytidine
  modified_base 71: mod_base = OTHER; note = 2'-O-methyl uridine
  modified_base 72: mod_base = OTHER; note = 2'-O-methyl uridine
  modified_base 73: mod_base = OTHER; note = 2'-O-methyl guanosine
  modified_base 74: mod_base = OTHER; note = 2'-O-methyl adenosine
  modified_base 75: mod_base = OTHER; note = 2'-O-methyl adenosine
  modified_base 76: mod_base = OTHER; note = 2'-O-methyl adenosine
  modified_base 77: mod_base = OTHER; note = 2'-O-methyl adenosine
  modified_base 78: mod_base = OTHER; note = 2'-O-methyl adenosine
  modified_base 79: mod_base = OTHER; note = 2'-O-methyl guanosine
  modified_base 80: mod_base = OTHER; note = 2'-O-methyl uridine
  modified_base 81: mod_base = OTHER; note = 2'-O-methyl guanosine
  modified_base 82: mod_base = OTHER; note = 2'-O-methyl guanosine
  modified_base 83: mod_base = OTHER; note = 2'-O-methyl cytidine
  modified_base 84: mod_base = OTHER; note = 2'-O-methyl adenosine
  modified_base 85: mod_base = OTHER; note = 2'-O-methyl cytidine
  modified_base 86: mod_base = OTHER; note = 2'-O-methyl cytidine
  modified_base 87: mod_base = OTHER; note = 2'-O-methyl guanosine
  modified_base 88: mod_base = OTHER; note = 2'-O-methyl adenosine
  modified_base 89: mod_base = OTHER; note = 2'-O-methyl guanosine
  modified_base 90: mod_base = OTHER; note = 2'-O-methyl uridine
  modified_base 91: mod_base = OTHER; note = 2'-O-methyl cytidine
  modified_base 92: mod_base = OTHER; note = 2'-O-methyl guanosine
  modified_base 93: mod_base = OTHER; note = 2'-O-methyl guanosine
  modified_base 94: mod_base = OTHER; note = 2'-O-methyl uridine
  modified_base 95: mod_base = OTHER; note = 2'-O-methyl guanosine
  modified_base 96: mod_base = OTHER; note = 2'-O-methyl cytidine
  modified_base 118: mod_base = OTHER; note = cytidine phosphorothioate
  modified_base 119: mod_base = OTHER; note = 2'-O-methyl uridine phosphorothioate
  modified_base 120: mod_base = OTHER; note = 2'-O-methyl guanosine phosphorothioate
  modified_base 121: mod_base = OTHER; note = 2'-O-methyl cytidine
gtaacggcagacttctcctcgttttagagctagaaatagcaagttaaaataaggctagtccgttatcaacttgaaaaagtggcaccgagtcggtgcacctgactccggcggagaagtctgc

SEQ ID NO: 20937 - RNA, 121 nt, synthetic construct
  source 1..121: mol_type = other RNA
  modified_base 1: mod_base = OTHER; note = 2'-O-methyl guanosine phosphorothioate
  modified_base 2: mod_base = OTHER; note = 2'-O-methyl uridine phosphorothioate
  modified_base 3: mod_base = OTHER; note = 2'-O-methyl adenosine phosphorothioate
  modified_base 29: mod_base = OTHER; note = 2'-O-methyl guanosine
  modified_base 30: mod_base = OTHER; note = 2'-O-methyl cytidine
  modified_base 31: mod_base = OTHER; note = 2'-O-methyl uridine
  modified_base 32: mod_base = OTHER; note = 2'-O-methyl adenosine
  modified_base 33: mod_base = OTHER; note = 2'-O-methyl guanosine
  modified_base 34: mod_base = OTHER; note = 2'-O-methyl adenosine
  modified_base 35: mod_base = OTHER; note = 2'-O-methyl adenosine
  modified_base 36: mod_base = OTHER; note = 2'-O-methyl adenosine
  modified_base 37: mod_base = OTHER; note = 2'-O-methyl uridine
  modified_base 38: mod_base = OTHER; note = 2'-O-methyl adenosine
  modified_base 39: mod_base = OTHER; note = 2'-O-methyl guanosine
  modified_base 40: mod_base = OTHER; note = 2'-O-methyl cytidine
  modified_base 69: mod_base = OTHER; note = 2'-O-methyl adenosine
  modified_base 70: mod_base = OTHER; note = 2'-O-methyl cytidine
  modified_base 71: mod_base = OTHER; note = 2'-O-methyl uridine
  modified_base 72: mod_base = OTHER; note = 2'-O-methyl uridine
  modified_base 73: mod_base = OTHER; note = 2'-O-methyl guanosine
  modified_base 74: mod_base = OTHER; note = 2'-O-methyl adenosine
  modified_base 75: mod_base = OTHER; note = 2'-O-methyl adenosine
  modified_base 76: mod_base = OTHER; note = 2'-O-methyl adenosine
  modified_base 77: mod_base = OTHER; note = 2'-O-methyl adenosine
  modified_base 78: mod_base = OTHER; note = 2'-O-methyl adenosine
  modified_base 79: mod_base = OTHER; note = 2'-O-methyl guanosine
  modified_base 80: mod_base = OTHER; note = 2'-O-methyl uridine
  modified_base 81: mod_base = OTHER; note = 2'-O-methyl guanosine
  modified_base 82: mod_base = OTHER; note = 2'-O-methyl guanosine
  modified_base 83: mod_base = OTHER; note = 2'-O-methyl cytidine
  modified_base 84: mod_base = OTHER; note = 2'-O-methyl adenosine
  modified_base 85: mod_base = OTHER; note = 2'-O-methyl cytidine
  modified_base 86: mod_base = OTHER; note = 2'-O-methyl cytidine
  modified_base 87: mod_base = OTHER; note = 2'-O-methyl guanosine
  modified_base 88: mod_base = OTHER; note = 2'-O-methyl adenosine
  modified_base 89: mod_base = OTHER; note = 2'-O-methyl guanosine
  modified_base 90: mod_base = OTHER; note = 2'-O-methyl uridine
  modified_base 91: mod_base = OTHER; note = 2'-O-methyl cytidine
  modified_base 92: mod_base = OTHER; note = 2'-O-methyl guanosine
  modified_base 93: mod_base = OTHER; note = 2'-O-methyl guanosine
  modified_base 94: mod_base = OTHER; note = 2'-O-methyl uridine
  modified_base 95: mod_base = OTHER; note = 2'-O-methyl guanosine
  modified_base 96: mod_base = OTHER; note = 2'-O-methyl cytidine
  modified_base 118: mod_base = OTHER; note = cytidine phosphorothioate
  modified_base 119: mod_base = OTHER; note = 2'-O-methyl uridine phosphorothioate
  modified_base 120: mod_base = OTHER; note = 2'-O-methyl guanosine phosphorothioate
  modified_base 121: mod_base = OTHER; note = 2'-O-methyl cytidine
gtaacggcagacttctcctcgttttagagctagaaatagcaagttaaaataaggctagtccgttatcaacttgaaaaagtggcaccgagtcggtgcacctgactcccgcggagaagtctgc

SEQ ID NO: 20938 - RNA, 121 nt, synthetic construct
  source 1..121: mol_type = other RNA
  modified_base 1: mod_base = OTHER; note = 2'-O-methyl guanosine phosphorothioate
  modified_base 2: mod_base = OTHER; note = 2'-O-methyl uridine phosphorothioate
  modified_base 3: mod_base = OTHER; note = 2'-O-methyl adenosine phosphorothioate
  modified_base 29: mod_base = OTHER; note = 2'-O-methyl guanosine
  modified_base 30: mod_base = OTHER; note = 2'-O-methyl cytidine
  modified_base 31: mod_base = OTHER; note = 2'-O-methyl uridine
  modified_base 32: mod_base = OTHER; note = 2'-O-methyl adenosine
  modified_base 33: mod_base = OTHER; note = 2'-O-methyl guanosine
  modified_base 34: mod_base = OTHER; note = 2'-O-methyl adenosine
  modified_base 35: mod_base = OTHER; note = 2'-O-methyl adenosine
  modified_base 36: mod_base = OTHER; note = 2'-O-methyl adenosine
  modified_base 37: mod_base = OTHER; note = 2'-O-methyl uridine
  modified_base 38: mod_base = OTHER; note = 2'-O-methyl adenosine
  modified_base 39: mod_base = OTHER; note = 2'-O-methyl guanosine
  modified_base 40: mod_base = OTHER; note = 2'-O-methyl cytidine
  modified_base 69: mod_base = OTHER; note = 2'-O-methyl adenosine
  modified_base 70: mod_base = OTHER; note = 2'-O-methyl cytidine
  modified_base 71: mod_base = OTHER; note = 2'-O-methyl uridine
  modified_base 72: mod_base = OTHER; note = 2'-O-methyl uridine
  modified_base 73: mod_base = OTHER; note = 2'-O-methyl guanosine
  modified_base 74: mod_base = OTHER; note = 2'-O-methyl adenosine
  modified_base 75: mod_base = OTHER; note = 2'-O-methyl adenosine
  modified_base 76: mod_base = OTHER; note = 2'-O-methyl adenosine
  modified_base 77: mod_base = OTHER; note = 2'-O-methyl adenosine
  modified_base 78: mod_base = OTHER; note = 2'-O-methyl adenosine
  modified_base 79: mod_base = OTHER; note = 2'-O-methyl guanosine
  modified_base 80: mod_base = OTHER; note = 2'-O-methyl uridine
  modified_base 81: mod_base = OTHER; note = 2'-O-methyl guanosine
  modified_base 82: mod_base = OTHER; note = 2'-O-methyl guanosine
  modified_base 83: mod_base = OTHER; note = 2'-O-methyl cytidine
  modified_base 84: mod_base = OTHER; note = 2'-O-methyl adenosine
  modified_base 85: mod_base = OTHER; note = 2'-O-methyl cytidine
  modified_base 86: mod_base = OTHER; note = 2'-O-methyl cytidine
  modified_base 87: mod_base = OTHER; note = 2'-O-methyl guanosine
  modified_base 88: mod_base = OTHER; note = 2'-O-methyl adenosine
  modified_base 89: mod_base = OTHER; note = 2'-O-methyl guanosine
  modified_base 90: mod_base = OTHER; note = 2'-O-methyl uridine
  modified_base 91: mod_base = OTHER; note = 2'-O-methyl cytidine
  modified_base 92: mod_base = OTHER; note = 2'-O-methyl guanosine
  modified_base 93: mod_base = OTHER; note = 2'-O-methyl guanosine
  modified_base 94: mod_base = OTHER; note = 2'-O-methyl uridine
  modified_base 95: mod_base = OTHER; note = 2'-O-methyl guanosine
  modified_base 96: mod_base = OTHER; note = 2'-O-methyl cytidine
  modified_base 118: mod_base = OTHER; note = cytidine phosphorothioate
  modified_base 119: mod_base = OTHER; note = 2'-O-methyl uridine phosphorothioate
  modified_base 120: mod_base = OTHER; note = 2'-O-methyl guanosine phosphorothioate
  modified_base 121: mod_base = OTHER; note = 2'-O-methyl cytidine
gtaacggcagacttctcctcgttttagagctagaaatagcaagttaaaataaggctagtccgttatcaacttgaaaaagtggcaccgagtcggtgcacctgactccagcggagaagtctgc

SEQ ID NO: 20939 - RNA, 120 nt, synthetic construct; identical to SEQ ID NO: 20842
  source 1..120: mol_type = other RNA
  modified_base 1: mod_base = OTHER; note = 2'-O-methyl cytidine phosphorothioate
  modified_base 2: mod_base = OTHER; note = 2'-O-methyl adenosine phosphorothioate
  modified_base 3: mod_base = OTHER; note = 2'-O-methyl uridine phosphorothioate
  modified_base 29: mod_base = OTHER; note = 2'-O-methyl guanosine
  modified_base 30: mod_base = OTHER; note = 2'-O-methyl cytidine
  modified_base 31: mod_base = OTHER; note = 2'-O-methyl uridine
  modified_base 32: mod_base = OTHER; note = 2'-O-methyl adenosine
  modified_base 33: mod_base = OTHER; note = 2'-O-methyl guanosine
  modified_base 34: mod_base = OTHER; note = 2'-O-methyl adenosine
  modified_base 35: mod_base = OTHER; note = 2'-O-methyl adenosine
  modified_base 36: mod_base = OTHER; note = 2'-O-methyl adenosine
  modified_base 37: mod_base = OTHER; note = 2'-O-methyl uridine
  modified_base 38: mod_base = OTHER; note = 2'-O-methyl adenosine
  modified_base 39: mod_base = OTHER; note = 2'-O-methyl guanosine
  modified_base 40: mod_base = OTHER; note = 2'-O-methyl cytidine
  modified_base 69: mod_base = OTHER; note = 2'-O-methyl adenosine
  modified_base 70: mod_base = OTHER; note = 2'-O-methyl cytidine
  modified_base 71: mod_base = OTHER; note = 2'-O-methyl uridine
  modified_base 72: mod_base = OTHER; note = 2'-O-methyl uridine
  modified_base 73: mod_base = OTHER; note = 2'-O-methyl guanosine
  modified_base 74: mod_base = OTHER; note = 2'-O-methyl adenosine
  modified_base 75: mod_base = OTHER; note = 2'-O-methyl adenosine
  modified_base 76: mod_base = OTHER; note = 2'-O-methyl adenosine
  modified_base 77: mod_base = OTHER; note = 2'-O-methyl adenosine
  modified_base 78: mod_base = OTHER; note = 2'-O-methyl adenosine
  modified_base 79: mod_base = OTHER; note = 2'-O-methyl guanosine
  modified_base 80: mod_base = OTHER; note = 2'-O-methyl uridine
  modified_base 81: mod_base = OTHER; note = 2'-O-methyl guanosine
  modified_base 82: mod_base = OTHER; note = 2'-O-methyl guanosine
  modified_base 83: mod_base = OTHER; note = 2'-O-methyl cytidine
  modified_base 84: mod_base = OTHER; note = 2'-O-methyl adenosine
  modified_base 85: mod_base = OTHER; note = 2'-O-methyl cytidine
  modified_base 86: mod_base = OTHER; note = 2'-O-methyl cytidine
  modified_base 87: mod_base = OTHER; note = 2'-O-methyl guanosine
  modified_base 88: mod_base = OTHER; note = 2'-O-methyl adenosine
  modified_base 89: mod_base = OTHER; note = 2'-O-methyl guanosine
  modified_base 90: mod_base = OTHER; note = 2'-O-methyl uridine
  modified_base 91: mod_base = OTHER; note = 2'-O-methyl cytidine
  modified_base 92: mod_base = OTHER; note = 2'-O-methyl guanosine
  modified_base 93: mod_base = OTHER; note = 2'-O-methyl guanosine
  modified_base 94: mod_base = OTHER; note = 2'-O-methyl uridine
  modified_base 95: mod_base = OTHER; note = 2'-O-methyl guanosine
  modified_base 96: mod_base = OTHER; note = 2'-O-methyl cytidine
  modified_base 117: mod_base = OTHER; note = guanosine phosphorothioate
  modified_base 118: mod_base = OTHER; note = 2'-O-methyl guanosine phosphorothioate
  modified_base 119: mod_base = OTHER; note = 2'-O-methyl uridine phosphorothioate
  modified_base 120: mod_base = OTHER; note = 2'-O-methyl guanosine

SEQ ID NO: 20940 - RNA, 120 nt, synthetic construct
  source 1..120: mol_type = other RNA
  modified_base 1: mod_base = OTHER; note = 2'-O-methyl cytidine phosphorothioate
  modified_base 2: mod_base = OTHER; note = 2'-O-methyl adenosine phosphorothioate
  modified_base 3: mod_base = OTHER; note = 2'-O-methyl uridine phosphorothioate
  modified_base 29: mod_base = OTHER; note = 2'-O-methyl guanosine
  modified_base 30: mod_base = OTHER; note = 2'-O-methyl cytidine
  modified_base 31: mod_base = OTHER; note = 2'-O-methyl uridine
  modified_base 32: mod_base = OTHER; note = 2'-O-methyl adenosine
  modified_base 33: mod_base = OTHER; note = 2'-O-methyl guanosine
  modified_base 34: mod_base = OTHER; note = 2'-O-methyl adenosine
  modified_base 35: mod_base = OTHER; note = 2'-O-methyl adenosine
  modified_base 36: mod_base = OTHER; note = 2'-O-methyl adenosine
  modified_base 37: mod_base = OTHER; note = 2'-O-methyl uridine
  modified_base 38: mod_base = OTHER; note = 2'-O-methyl adenosine
  modified_base 39: mod_base = OTHER; note = 2'-O-methyl guanosine
  modified_base 40: mod_base = OTHER; note = 2'-O-methyl cytidine
  modified_base 69: mod_base = OTHER; note = 2'-O-methyl adenosine
  modified_base 70: mod_base = OTHER; note = 2'-O-methyl cytidine
  modified_base 71: mod_base = OTHER; note = 2'-O-methyl uridine
  modified_base 72: mod_base = OTHER; note = 2'-O-methyl uridine
  modified_base 73: mod_base = OTHER; note = 2'-O-methyl guanosine
  modified_base 74: mod_base = OTHER; note = 2'-O-methyl adenosine
  modified_base 75: mod_base = OTHER; note = 2'-O-methyl adenosine
  modified_base 76: mod_base = OTHER; note = 2'-O-methyl adenosine
  modified_base 77: mod_base = OTHER; note = 2'-O-methyl adenosine
  modified_base 78: mod_base = OTHER; note = 2'-O-methyl adenosine
  modified_base 79: mod_base = OTHER; note = 2'-O-methyl guanosine
  modified_base 80: mod_base = OTHER; note = 2'-O-methyl uridine
  modified_base 81: mod_base = OTHER; note = 2'-O-methyl guanosine
  modified_base 82: mod_base = OTHER; note = 2'-O-methyl guanosine
  modified_base 83: mod_base = OTHER; note = 2'-O-methyl cytidine
  modified_base 84: mod_base = OTHER; note = 2'-O-methyl adenosine
  modified_base 85: mod_base = OTHER; note = 2'-O-methyl cytidine
  modified_base 86: mod_base = OTHER; note = 2'-O-methyl cytidine
  modified_base 87: mod_base = OTHER; note = 2'-O-methyl guanosine
  modified_base 88: mod_base = OTHER; note = 2'-O-methyl adenosine
  modified_base 89: mod_base = OTHER; note = 2'-O-methyl guanosine
  modified_base 90: mod_base = OTHER; note = 2'-O-methyl uridine
  modified_base 91: mod_base = OTHER; note = 2'-O-methyl cytidine
  modified_base 92: mod_base = OTHER; note = 2'-O-methyl guanosine
  modified_base 93: mod_base = OTHER; note = 2'-O-methyl guanosine
  modified_base 94: mod_base = OTHER; note = 2'-O-methyl uridine
  modified_base 95: mod_base = OTHER; note = 2'-O-methyl guanosine
  modified_base 96: mod_base = OTHER; note = 2'-O-methyl cytidine
  modified_base 117: mod_base = OTHER; note = guanosine phosphorothioate
  modified_base 118: mod_base = OTHER; note = 2'-O-methyl guanosine phosphorothioate
  modified_base 119: mod_base = OTHER; note = 2'-O-methyl uridine phosphorothioate
  modified_base 120: mod_base = OTHER; note = 2'-O-methyl guanosine
catggtgcacctgactcctggttttagagctagaaatagcaagttaaaataaggctagtccgttatcaacttgaaaaagtggcaccgagtcggtgcagacttctcttccggagtcaggtg

SEQ ID NO: 20941 - RNA, 121 nt, synthetic construct
  source 1..121: mol_type = other RNA
  modified_base 1: mod_base = OTHER; note = 2'-O-methyl guanosine phosphorothioate
  modified_base 2: mod_base = OTHER; note = 2'-O-methyl uridine phosphorothioate
  modified_base 3: mod_base = OTHER; note = 2'-O-methyl adenosine phosphorothioate
  modified_base 29: mod_base = OTHER; note = 2'-O-methyl guanosine
  modified_base 30: mod_base = OTHER; note = 2'-O-methyl cytidine
  modified_base 31: mod_base = OTHER; note = 2'-O-methyl uridine
  modified_base 32: mod_base = OTHER; note = 2'-O-methyl adenosine
  modified_base 33: mod_base = OTHER; note = 2'-O-methyl guanosine
  modified_base 34: mod_base = OTHER; note = 2'-O-methyl adenosine
  modified_base 35: mod_base = OTHER; note = 2'-O-methyl adenosine
  modified_base 36: mod_base = OTHER; note = 2'-O-methyl adenosine
  modified_base 37: mod_base = OTHER; note = 2'-O-methyl uridine
  modified_base 38: mod_base = OTHER; note = 2'-O-methyl adenosine
  modified_base 39: mod_base = OTHER; note = 2'-O-methyl guanosine
  modified_base 40: mod_base = OTHER; note = 2'-O-methyl cytidine
  modified_base 69: mod_base = OTHER; note = 2'-O-methyl adenosine
  modified_base 70: mod_base = OTHER; note = 2'-O-methyl cytidine
  modified_base 71: mod_base = OTHER; note = 2'-O-methyl uridine
  modified_base 72: mod_base = OTHER; note = 2'-O-methyl uridine
  modified_base 73: mod_base = OTHER; note = 2'-O-methyl guanosine
  modified_base 74: mod_base = OTHER; note = 2'-O-methyl adenosine
  modified_base 75: mod_base = OTHER; note = 2'-O-methyl adenosine
  modified_base 76: mod_base = OTHER; note = 2'-O-methyl adenosine
  modified_base 77: mod_base = OTHER; note = 2'-O-methyl adenosine
  modified_base 78: mod_base = OTHER; note = 2'-O-methyl adenosine
  modified_base 79: mod_base = OTHER; note = 2'-O-methyl guanosine
  modified_base 80: mod_base = OTHER; note = 2'-O-methyl uridine
  modified_base 81: mod_base = OTHER; note = 2'-O-methyl guanosine
  modified_base 82: mod_base = OTHER; note = 2'-O-methyl guanosine
  modified_base 83: mod_base = OTHER; note = 2'-O-methyl cytidine
  modified_base 84: mod_base = OTHER; note = 2'-O-methyl adenosine
  modified_base 85: mod_base = OTHER; note = 2'-O-methyl cytidine
  modified_base 86: mod_base = OTHER; note = 2'-O-methyl cytidine
  modified_base 87: mod_base = OTHER; note = 2'-O-methyl guanosine
  modified_base 88: mod_base = OTHER; note = 2'-O-methyl adenosine
  modified_base 89: mod_base = OTHER; note = 2'-O-methyl guanosine
  modified_base 90: mod_base = OTHER; note = 2'-O-methyl uridine
  modified_base 91: mod_base = OTHER; note = 2'-O-methyl cytidine
  modified_base 92: mod_base = OTHER; note = 2'-O-methyl guanosine
  modified_base 93: mod_base = OTHER; note = 2'-O-methyl guanosine
  modified_base 94: mod_base = OTHER; note = 2'-O-methyl uridine
  modified_base 95: mod_base = OTHER; note = 2'-O-methyl guanosine
  modified_base 96: mod_base = OTHER; note = 2'-O-methyl cytidine
  modified_base 118: mod_base = OTHER; note = cytidine phosphorothioate
  modified_base 119: mod_base = OTHER; note = 2'-O-methyl uridine phosphorothioate
  modified_base 120: mod_base = OTHER; note = 2'-O-methyl guanosine phosphorothioate
  modified_base 121: mod_base = OTHER; note = 2'-O-methyl cytidine
gtaacggcagacttctccacgttttagagctagaaatagcaagttaaaataaggctagtccgttatcaacttgaaaaagtggcaccgagtcggtgcacctgactcctgcggagaagtctgc

SEQ ID NO: 20942 - RNA, 121 nt, synthetic construct; identical to SEQ ID NO: 20477
  source 1..121: mol_type = other RNA
  modified_base 1: mod_base = OTHER; note = 2'-O-methyl guanosine phosphorothioate
  modified_base 2: mod_base = OTHER; note = 2'-O-methyl uridine phosphorothioate
  modified_base 3: mod_base = OTHER; note = 2'-O-methyl adenosine phosphorothioate
  modified_base 29: mod_base = OTHER; note = 2'-O-methyl guanosine
  modified_base 30: mod_base = OTHER; note = 2'-O-methyl cytidine
  modified_base 31: mod_base = OTHER; note = 2'-O-methyl uridine
  modified_base 32: mod_base = OTHER; note = 2'-O-methyl adenosine
  modified_base 33: mod_base = OTHER; note = 2'-O-methyl guanosine
  modified_base 34: mod_base = OTHER; note = 2'-O-methyl adenosine
  modified_base 35: mod_base = OTHER; note = 2'-O-methyl adenosine
  modified_base 36: mod_base = OTHER; note = 2'-O-methyl adenosine
  modified_base 37: mod_base = OTHER; note = 2'-O-methyl uridine
  modified_base 38: mod_base = OTHER; note = 2'-O-methyl adenosine
  modified_base 39: mod_base = OTHER; note = 2'-O-methyl guanosine
  modified_base 40: mod_base = OTHER; note = 2'-O-methyl cytidine
  modified_base 69: mod_base = OTHER; note = 2'-O-methyl adenosine
  modified_base 70: mod_base = OTHER; note = 2'-O-methyl cytidine
  modified_base 71: mod_base = OTHER; note = 2'-O-methyl uridine
  modified_base 72: mod_base = OTHER; note = 2'-O-methyl uridine
  modified_base 73: mod_base = OTHER; note = 2'-O-methyl guanosine
  modified_base 74: mod_base = OTHER; note = 2'-O-methyl adenosine
  modified_base 75: mod_base = OTHER; note = 2'-O-methyl adenosine
  modified_base 76: mod_base = OTHER; note = 2'-O-methyl adenosine
  modified_base 77: mod_base = OTHER; note = 2'-O-methyl adenosine
  modified_base 78: mod_base = OTHER; note = 2'-O-methyl adenosine
  modified_base 79: mod_base = OTHER; note = 2'-O-methyl guanosine
  modified_base 80: mod_base = OTHER; note = 2'-O-methyl uridine
  modified_base 81: mod_base = OTHER; note = 2'-O-methyl guanosine
  modified_base 82: mod_base = OTHER; note = 2'-O-methyl guanosine
  modified_base 83: mod_base = OTHER; note = 2'-O-methyl cytidine
  modified_base 84: mod_base = OTHER; note = 2'-O-methyl adenosine
  modified_base 85: mod_base = OTHER; note = 2'-O-methyl cytidine
  modified_base 86: mod_base = OTHER; note = 2'-O-methyl cytidine
  modified_base 87: mod_base = OTHER; note = 2'-O-methyl guanosine
  modified_base 88: mod_base = OTHER; note = 2'-O-methyl adenosine
  modified_base 89: mod_base = OTHER; note = 2'-O-methyl guanosine
  modified_base 90: mod_base = OTHER; note = 2'-O-methyl uridine
  modified_base 91: mod_base = OTHER; note = 2'-O-methyl cytidine
  modified_base 92: mod_base = OTHER; note = 2'-O-methyl guanosine
  modified_base 93: mod_base = OTHER; note = 2'-O-methyl guanosine
  modified_base 94: mod_base = OTHER; note = 2'-O-methyl uridine
  modified_base 95: mod_base = OTHER; note = 2'-O-methyl guanosine
  modified_base 96: mod_base = OTHER; note = 2'-O-methyl cytidine
  modified_base 118: mod_base = OTHER; note = cytidine phosphorothioate
  modified_base 119: mod_base = OTHER; note = 2'-O-methyl uridine phosphorothioate
  modified_base 120: mod_base = OTHER; note = 2'-O-methyl guanosine phosphorothioate
  modified_base 121: mod_base = OTHER; note = 2'-O-methyl cytidine

SEQ ID NO: 20943 - RNA, 121 nt, synthetic construct
  source 1..121: mol_type = other RNA
  modified_base 1: mod_base = OTHER; note = 2'-O-methyl guanosine phosphorothioate
  modified_base 2: mod_base = OTHER; note = 2'-O-methyl uridine phosphorothioate
  modified_base 3: mod_base = OTHER; note = 2'-O-methyl adenosine phosphorothioate
  modified_base 29: mod_base = OTHER; note = 2'-O-methyl guanosine
  modified_base 30: mod_base = OTHER; note = 2'-O-methyl cytidine
  modified_base 31: mod_base = OTHER; note = 2'-O-methyl uridine
  modified_base 32: mod_base = OTHER; note = 2'-O-methyl adenosine
  modified_base 33: mod_base = OTHER; note = 2'-O-methyl guanosine
  modified_base 34: mod_base = OTHER; note = 2'-O-methyl adenosine
  modified_base 35: mod_base = OTHER; note = 2'-O-methyl adenosine
  modified_base 36: mod_base = OTHER; note = 2'-O-methyl adenosine
  modified_base 37: mod_base = OTHER; note = 2'-O-methyl uridine
  modified_base 38: mod_base = OTHER; note = 2'-O-methyl adenosine
  modified_base 39: mod_base = OTHER; note = 2'-O-methyl guanosine
  modified_base 40: mod_base = OTHER; note = 2'-O-methyl cytidine
  modified_base 69: mod_base = OTHER; note = 2'-O-methyl adenosine
  modified_base 70: mod_base = OTHER; note = 2'-O-methyl cytidine
  modified_base 71: mod_base = OTHER; note = 2'-O-methyl uridine
  modified_base 72: mod_base = OTHER; note = 2'-O-methyl uridine
  modified_base 73: mod_base = OTHER; note = 2'-O-methyl guanosine
  modified_base 74: mod_base = OTHER; note = 2'-O-methyl adenosine
  modified_base 75: mod_base = OTHER; note = 2'-O-methyl adenosine
  modified_base 76: mod_base = OTHER; note = 2'-O-methyl adenosine
  modified_base 77: mod_base = OTHER; note = 2'-O-methyl adenosine
  modified_base 78: mod_base = OTHER; note = 2'-O-methyl adenosine
  modified_base 79: mod_base = OTHER; note = 2'-O-methyl guanosine
  modified_base 80: mod_base = OTHER; note = 2'-O-methyl uridine
  modified_base 81: mod_base = OTHER; note = 2'-O-methyl guanosine
  modified_base 82: mod_base = OTHER; note = 2'-O-methyl guanosine
  modified_base 83: mod_base = OTHER; note = 2'-O-methyl cytidine
  modified_base 84: mod_base = OTHER; note = 2'-O-methyl adenosine
  modified_base 85: mod_base = OTHER; note = 2'-O-methyl cytidine
  modified_base 86: mod_base = OTHER; note = 2'-O-methyl cytidine
  modified_base 87: mod_base = OTHER; note = 2'-O-methyl guanosine
  modified_base 88: mod_base = OTHER; note = 2'-O-methyl adenosine
  modified_base 89: mod_base = OTHER; note = 2'-O-methyl guanosine
  modified_base 90: mod_base = OTHER; note = 2'-O-methyl uridine
  modified_base 91: mod_base = OTHER; note = 2'-O-methyl cytidine
  modified_base 92: mod_base = OTHER; note = 2'-O-methyl guanosine
  modified_base 93: mod_base = OTHER; note = 2'-O-methyl guanosine
  modified_base 94: mod_base = OTHER; note = 2'-O-methyl uridine
  modified_base 95: mod_base = OTHER; note = 2'-O-methyl guanosine
  modified_base 96: mod_base = OTHER; note = 2'-O-methyl cytidine
  modified_base 118: mod_base = OTHER; note = cytidine phosphorothioate
  modified_base 119: mod_base = OTHER; note = 2'-O-methyl uridine phosphorothioate
  modified_base 120: mod_base = OTHER; note = 2'-O-methyl guanosine phosphorothioate
  modified_base 121: mod_base = OTHER; note = 2'-O-methyl cytidine
gtaacggcagacttctccacgttttagagctagaaatagcaagttaaaataaggctagtccgttatcaacttgaaaaagtggcaccgagtcggtgcacctgactcccgcagagaagtctgc

SEQ ID NO: 20944 - RNA, 121 nt, synthetic construct
  source 1..121: mol_type = other RNA
  modified_base 1: mod_base = OTHER; note = 2'-O-methyl guanosine phosphorothioate
  modified_base 2: mod_base = OTHER; note = 2'-O-methyl uridine phosphorothioate
  modified_base 3: mod_base = OTHER; note = 2'-O-methyl adenosine phosphorothioate
  modified_base 29: mod_base = OTHER; note = 2'-O-methyl guanosine
  modified_base 30: mod_base = OTHER; note = 2'-O-methyl cytidine
  modified_base 31: mod_base = OTHER; note = 2'-O-methyl uridine
  modified_base 32: mod_base = OTHER; note = 2'-O-methyl adenosine
  modified_base 33: mod_base = OTHER; note = 2'-O-methyl guanosine
  modified_base 34: mod_base = OTHER; note = 2'-O-methyl adenosine
  modified_base 35: mod_base = OTHER; note = 2'-O-methyl adenosine
  modified_base 36: mod_base = OTHER; note = 2'-O-methyl adenosine
  modified_base 37: mod_base = OTHER; note = 2'-O-methyl uridine
  modified_base 38: mod_base = OTHER; note = 2'-O-methyl adenosine
  modified_base 39: mod_base = OTHER; note = 2'-O-methyl guanosine
  modified_base 40: mod_base = OTHER; note = 2'-O-methyl cytidine
  modified_base 69: mod_base = OTHER; note = 2'-O-methyl adenosine
  modified_base 70: mod_base = OTHER; note = 2'-O-methyl cytidine
  modified_base 71: mod_base = OTHER; note = 2'-O-methyl uridine
  modified_base 72: mod_base = OTHER; note = 2'-O-methyl uridine
  modified_base 73: mod_base = OTHER; note = 2'-O-methyl guanosine
  modified_base 74: mod_base = OTHER; note = 2'-O-methyl adenosine
  modified_base 75: mod_base = OTHER; note = 2'-O-methyl adenosine
  modified_base 76: mod_base = OTHER; note = 2'-O-methyl adenosine
  modified_base 77: mod_base = OTHER; note = 2'-O-methyl adenosine
  modified_base 78: mod_base = OTHER; note = 2'-O-methyl adenosine
  modified_base 79: mod_base = OTHER; note = 2'-O-methyl guanosine
  modified_base 80: mod_base = OTHER; note = 2'-O-methyl uridine
  modified_base 81: mod_base = OTHER; note = 2'-O-methyl guanosine
  modified_base 82: mod_base = OTHER; note = 2'-O-methyl guanosine
  modified_base 83: mod_base = OTHER; note = 2'-O-methyl cytidine
  modified_base 84: mod_base = OTHER; note = 2'-O-methyl adenosine
  modified_base 85: mod_base = OTHER; note = 2'-O-methyl cytidine
  modified_base 86: mod_base = OTHER; note = 2'-O-methyl cytidine
  modified_base 87: mod_base = OTHER; note = 2'-O-methyl guanosine
  modified_base 88: mod_base = OTHER; note = 2'-O-methyl adenosine
  modified_base 89: mod_base = OTHER; note = 2'-O-methyl guanosine
  modified_base 90: mod_base = OTHER; note = 2'-O-methyl uridine
  modified_base 91: mod_base = OTHER; note = 2'-O-methyl cytidine
  modified_base 92: mod_base = OTHER; note = 2'-O-methyl guanosine
  modified_base 93: mod_base = OTHER; note = 2'-O-methyl guanosine
  modified_base 94: mod_base = OTHER; note = 2'-O-methyl uridine
  modified_base 95: mod_base = OTHER; note = 2'-O-methyl guanosine
  modified_base 96: mod_base = OTHER; note = 2'-O-methyl cytidine
  modified_base 118: mod_base = OTHER; note = cytidine phosphorothioate
  modified_base 119: mod_base = OTHER; note = 2'-O-methyl uridine phosphorothioate
  modified_base 120: mod_base = OTHER; note = 2'-O-methyl guanosine phosphorothioate
  modified_base 121: mod_base = OTHER; note = 2'-O-methyl cytidine
gtaacggcagacttctccacgttttagagctagaaatagcaagttaaaataaggctagtccgttatcaacttgaaaaagtggcaccgagtcggtgcacctgactcccgaagagaagtctgc

SEQ ID NO: 20945 - RNA, 121 nt, synthetic construct
  source 1..121: mol_type = other RNA
  modified_base 1: mod_base = OTHER; note = 2'-O-methyl guanosine phosphorothioate
  modified_base 2: mod_base = OTHER; note = 2'-O-methyl uridine phosphorothioate
  modified_base 3: mod_base = OTHER; note = 2'-O-methyl adenosine phosphorothioate
  modified_base 29: mod_base = OTHER; note = 2'-O-methyl guanosine
  modified_base 30: mod_base = OTHER; note = 2'-O-methyl cytidine
  modified_base 31: mod_base = OTHER; note = 2'-O-methyl uridine
  modified_base 32: mod_base = OTHER; note = 2'-O-methyl adenosine
  modified_base 33: mod_base = OTHER; note = 2'-O-methyl guanosine
  modified_base 34: mod_base = OTHER; note = 2'-O-methyl adenosine
  modified_base 35: mod_base = OTHER; note = 2'-O-methyl adenosine
  modified_base 36: mod_base = OTHER; note = 2'-O-methyl adenosine
  modified_base 37: mod_base = OTHER; note = 2'-O-methyl uridine
  modified_base 38: mod_base = OTHER; note = 2'-O-methyl adenosine
  modified_base 39: mod_base = OTHER; note = 2'-O-methyl guanosine
  modified_base 40: mod_base = OTHER; note = 2'-O-methyl cytidine
  modified_base 69: mod_base = OTHER; note = 2'-O-methyl adenosine
  modified_base 70: mod_base = OTHER; note = 2'-O-methyl cytidine
  modified_base 71: mod_base = OTHER; note = 2'-O-methyl uridine
  modified_base 72: mod_base = OTHER; note = 2'-O-methyl uridine
  modified_base 73: mod_base = OTHER; note = 2'-O-methyl guanosine
  modified_base 74: mod_base = OTHER; note = 2'-O-methyl adenosine
  modified_base 75: mod_base = OTHER; note = 2'-O-methyl adenosine
  modified_base 76: mod_base = OTHER; note = 2'-O-methyl adenosine
  modified_base 77: mod_base = OTHER; note = 2'-O-methyl adenosine
  modified_base 78: mod_base = OTHER; note = 2'-O-methyl adenosine
  modified_base 79: mod_base = OTHER; note = 2'-O-methyl guanosine
  modified_base 80: mod_base = OTHER; note = 2'-O-methyl uridine
  modified_base 81: mod_base = OTHER; note = 2'-O-methyl guanosine
  modified_base 82: mod_base = OTHER; note = 2'-O-methyl guanosine
  modified_base 83: mod_base = OTHER; note = 2'-O-methyl cytidine
  modified_base 84: mod_base = OTHER; note = 2'-O-methyl adenosine
  modified_base 85: mod_base = OTHER; note = 2'-O-methyl cytidine
  modified_base 86: mod_base = OTHER; note = 2'-O-methyl cytidine
  modified_base 87: mod_base = OTHER; note = 2'-O-methyl guanosine
  modified_base 88: mod_base = OTHER; note = 2'-O-methyl adenosine
  modified_base 89: mod_base = OTHER; note = 2'-O-methyl guanosine
  modified_base 90: mod_base = OTHER; note = 2'-O-methyl uridine
  modified_base 91: mod_base = OTHER; note = 2'-O-methyl cytidine
  modified_base 92: mod_base = OTHER; note = 2'-O-methyl guanosine
  modified_base 93: mod_base = OTHER; note = 2'-O-methyl guanosine
  modified_base 94: mod_base = OTHER; note = 2'-O-methyl uridine
  modified_base 95: mod_base = OTHER; note = 2'-O-methyl guanosine
  modified_base 96: mod_base = OTHER; note = 2'-O-methyl cytidine
  modified_base 118: mod_base = OTHER; note = cytidine phosphorothioate
  modified_base 119: mod_base = OTHER; note = 2'-O-methyl uridine phosphorothioate
  modified_base 120: mod_base = OTHER; note = 2'-O-methyl guanosine phosphorothioate
  modified_base 121: mod_base = OTHER; note = 2'-O-methyl cytidine
gtaacggcagacttctccacgttttagagctagaaatagcaagttaaaataaggctagtccgttatcaacttgaaaaagtggcaccgagtcggtgcacctgactcccgctgagaagtctgc

SEQ ID NO: 20946 - RNA, 121 nt, synthetic construct
  source 1..121: mol_type = other RNA
  modified_base 1: mod_base = OTHER; note = 2'-O-methyl guanosine phosphorothioate
  modified_base 2: mod_base = OTHER; note = 2'-O-methyl uridine phosphorothioate
  modified_base 3: mod_base = OTHER; note = 2'-O-methyl adenosine phosphorothioate
  modified_base 29: mod_base = OTHER; note = 2'-O-methyl guanosine
  modified_base 30: mod_base = OTHER; note = 2'-O-methyl cytidine
  modified_base 31: mod_base = OTHER; note = 2'-O-methyl uridine
  modified_base 32: mod_base = OTHER; note = 2'-O-methyl adenosine
  modified_base 33: mod_base = OTHER; note = 2'-O-methyl guanosine
  modified_base 34: mod_base = OTHER; note = 2'-O-methyl adenosine
  modified_base 35: mod_base = OTHER; note = 2'-O-methyl adenosine
  modified_base 36: mod_base = OTHER; note = 2'-O-methyl adenosine
  modified_base 37: mod_base = OTHER; note = 2'-O-methyl uridine
  modified_base 38: mod_base = OTHER; note = 2'-O-methyl adenosine
  modified_base 39: mod_base = OTHER; note = 2'-O-methyl guanosine
  modified_base 40: mod_base = OTHER; note = 2'-O-methyl cytidine
  modified_base 69: mod_base = OTHER; note = 2'-O-methyl adenosine
  modified_base 70: mod_base = OTHER; note = 2'-O-methyl cytidine
  modified_base 71: mod_base = OTHER; note = 2'-O-methyl uridine
  modified_base 72: mod_base = OTHER; note = 2'-O-methyl uridine
  modified_base 73: mod_base = OTHER; note = 2'-O-methyl guanosine
  modified_base 74: mod_base = OTHER; note = 2'-O-methyl adenosine
  modified_base 75: mod_base = OTHER; note = 2'-O-methyl adenosine
  modified_base 76: mod_base = OTHER; note = 2'-O-methyl adenosine
  modified_base 77: mod_base = OTHER; note = 2'-O-methyl adenosine
  modified_base 78: mod_base = OTHER; note = 2'-O-methyl adenosine
  modified_base 79: mod_base = OTHER; note = 2'-O-methyl guanosine
  modified_base 80: mod_base = OTHER; note = 2'-O-methyl uridine
  modified_base 81: mod_base = OTHER; note = 2'-O-methyl guanosine
  modified_base 82: mod_base = OTHER; note = 2'-O-methyl guanosine
  modified_base 83: mod_base = OTHER; note = 2'-O-methyl cytidine
  modified_base 84: mod_base = OTHER; note = 2'-O-methyl adenosine
  modified_base 85: mod_base = OTHER; note = 2'-O-methyl cytidine
  modified_base 86: mod_base = OTHER; note = 2'-O-methyl cytidine
  modified_base 87: mod_base = OTHER; note = 2'-O-methyl guanosine
  modified_base 88: mod_base = OTHER; note = 2'-O-methyl adenosine
  modified_base 89: mod_base = OTHER; note = 2'-O-methyl guanosine
  modified_base 90: mod_base = OTHER; note = 2'-O-methyl uridine
  modified_base 91: mod_base = OTHER; note = 2'-O-methyl cytidine
  modified_base 92: mod_base = OTHER; note = 2'-O-methyl guanosine
  modified_base 93: mod_base = OTHER; note = 2'-O-methyl guanosine
  modified_base 94: mod_base = OTHER; note = 2'-O-methyl uridine
  modified_base 95: mod_base = OTHER; note = 2'-O-methyl guanosine
  modified_base 96: mod_base = OTHER; note = 2'-O-methyl cytidine
  modified_base 118: mod_base = OTHER; note = cytidine phosphorothioate
  modified_base 119: mod_base = OTHER; note = 2'-O-methyl uridine phosphorothioate
  modified_base 120: mod_base = OTHER; note = 2'-O-methyl guanosine phosphorothioate
  modified_base 121: mod_base = OTHER; note = 2'-O-methyl cytidine
gtaacggcagacttctccacgttttagagctagaaatagcaagttaaaataaggctagtccgttatcaacttgaaaaagtggcaccgagtcggtgcacctgactcccgatgagaagtctgc

SEQ ID NO: 20947 - RNA, 121 nt, synthetic construct
  source 1..121: mol_type = other RNA
  modified_base 1: mod_base = OTHER; note = 2'-O-methyl guanosine phosphorothioate
  modified_base 2: mod_base = OTHER; note = 2'-O-methyl uridine phosphorothioate
  modified_base 3: mod_base = OTHER; note = 2'-O-methyl adenosine phosphorothioate
  modified_base 29: mod_base = OTHER; note = 2'-O-methyl guanosine
  modified_base 30: mod_base = OTHER; note = 2'-O-methyl cytidine
  modified_base 31: mod_base = OTHER; note = 2'-O-methyl uridine
  modified_base 32: mod_base = OTHER; note = 2'-O-methyl adenosine
  modified_base 33: mod_base = OTHER; note = 2'-O-methyl guanosine
  modified_base 34: mod_base = OTHER; note = 2'-O-methyl adenosine
  modified_base 35: mod_base = OTHER; note = 2'-O-methyl adenosine
  modified_base 36: mod_base = OTHER; note = 2'-O-methyl adenosine
  modified_base 37: mod_base = OTHER; note = 2'-O-methyl uridine
  modified_base 38: mod_base = OTHER; note = 2'-O-methyl adenosine
  modified_base 39: mod_base = OTHER; note = 2'-O-methyl guanosine
  modified_base 40: mod_base = OTHER; note = 2'-O-methyl cytidine
  modified_base 69: mod_base = OTHER; note = 2'-O-methyl adenosine
  modified_base 70: mod_base = OTHER; note = 2'-O-methyl cytidine
  modified_base 71: mod_base = OTHER; note = 2'-O-methyl uridine
  modified_base 72: mod_base = OTHER; note = 2'-O-methyl uridine
  modified_base 73: mod_base = OTHER; note = 2'-O-methyl guanosine
  modified_base 74: mod_base = OTHER; note = 2'-O-methyl adenosine
  modified_base 75: mod_base = OTHER; note = 2'-O-methyl adenosine
  modified_base 76: mod_base = OTHER; note = 2'-O-methyl adenosine
  modified_base 77: mod_base = OTHER; note = 2'-O-methyl adenosine
  modified_base 78: mod_base = OTHER; note = 2'-O-methyl adenosine
  modified_base 79: mod_base = OTHER; note = 2'-O-methyl guanosine
  modified_base 80: mod_base = OTHER; note = 2'-O-methyl uridine
  modified_base 81: mod_base = OTHER; note = 2'-O-methyl guanosine
  modified_base 82: mod_base = OTHER; note = 2'-O-methyl guanosine
  modified_base 83: mod_base = OTHER; note = 2'-O-methyl cytidine
  modified_base 84: mod_base = OTHER; note = 2'-O-methyl adenosine
  modified_base 85: mod_base = OTHER; note = 2'-O-methyl cytidine
  modified_base 86: mod_base = OTHER; note = 2'-O-methyl cytidine
  modified_base 87: mod_base = OTHER; note = 2'-O-methyl guanosine
  modified_base 88: mod_base = OTHER; note = 2'-O-methyl adenosine
  modified_base 89: mod_base = OTHER; note = 2'-O-methyl guanosine
  modified_base 90: mod_base = OTHER; note = 2'-O-methyl uridine
  modified_base 91: mod_base = OTHER; note = 2'-O-methyl cytidine
  modified_base 92: mod_base = OTHER; note = 2'-O-methyl guanosine
  modified_base 93: mod_base = OTHER; note = 2'-O-methyl guanosine
  modified_base 94: mod_base = OTHER; note = 2'-O-methyl uridine
  modified_base 95: mod_base = OTHER; note = 2'-O-methyl guanosine
  modified_base 96: mod_base = OTHER; note = 2'-O-methyl cytidine
  modified_base 118: mod_base = OTHER; note = cytidine phosphorothioate
  modified_base 119: mod_base = OTHER; note = 2'-O-methyl uridine phosphorothioate
  modified_base 120: mod_base = OTHER; note = 2'-O-methyl guanosine phosphorothioate
  modified_base 121: mod_base = OTHER; note = 2'-O-methyl cytidine
gtaacggcagacttctccacgttttagagctagaaatagcaagttaaaataaggctagtccgttatcaacttgaaaaagtggcaccgagtcggtgcacctgactcccgccgagaagtctgc

SEQ ID NO: 20948 - RNA, 121 nt, synthetic construct
  source 1..121: mol_type = other RNA
  modified_base 1: mod_base = OTHER; note = 2'-O-methyl guanosine phosphorothioate
  modified_base 2: mod_base = OTHER; note = 2'-O-methyl uridine phosphorothioate
  modified_base 3: mod_base = OTHER; note = 2'-O-methyl adenosine phosphorothioate
  modified_base 29: mod_base = OTHER; note = 2'-O-methyl guanosine
  modified_base 30: mod_base = OTHER; note = 2'-O-methyl cytidine
  modified_base 31: mod_base = OTHER; note = 2'-O-methyl uridine
  modified_base 32: mod_base = OTHER; note = 2'-O-methyl adenosine
  modified_base 33: mod_base = OTHER; note = 2'-O-methyl guanosine
  modified_base 34: mod_base = OTHER; note = 2'-O-methyl adenosine
  modified_base 35: mod_base = OTHER; note = 2'-O-methyl adenosine
  modified_base 36: mod_base = OTHER; note = 2'-O-methyl adenosine
  modified_base 37: mod_base = OTHER; note = 2'-O-methyl uridine
  modified_base 38: mod_base = OTHER; note = 2'-O-methyl adenosine
  modified_base 39: mod_base = OTHER; note = 2'-O-methyl guanosine
  modified_base 40: mod_base = OTHER; note = 2'-O-methyl cytidine
  modified_base 69: mod_base = OTHER; note = 2'-O-methyl adenosine
  modified_base 70: mod_base = OTHER; note = 2'-O-methyl cytidine
  modified_base 71: mod_base = OTHER; note = 2'-O-methyl uridine
  modified_base 72: mod_base = OTHER; note = 2'-O-methyl uridine
  modified_base 73: mod_base = OTHER; note = 2'-O-methyl guanosine
  modified_base 74: mod_base = OTHER; note = 2'-O-methyl adenosine
  modified_base 75: mod_base = OTHER; note = 2'-O-methyl adenosine
  modified_base 76: mod_base = OTHER; note = 2'-O-methyl adenosine
  modified_base 77: mod_base = OTHER; note = 2'-O-methyl adenosine
  modified_base 78: mod_base = OTHER; note = 2'-O-methyl adenosine
  modified_base 79: mod_base = OTHER; note = 2'-O-methyl guanosine
  modified_base 80: mod_base = OTHER; note = 2'-O-methyl uridine
  modified_base 81: mod_base = OTHER; note = 2'-O-methyl guanosine
  modified_base 82: mod_base = OTHER; note = 2'-O-methyl guanosine
  modified_base 83: mod_base = OTHER; note = 2'-O-methyl cytidine
  modified_base 84: mod_base = OTHER; note = 2'-O-methyl adenosine
  modified_base 85: mod_base = OTHER; note = 2'-O-methyl cytidine
  modified_base 86: mod_base = OTHER; note = 2'-O-methyl cytidine
  modified_base 87: mod_base = OTHER; note = 2'-O-methyl guanosine
  modified_base 88: mod_base = OTHER; note = 2'-O-methyl adenosine
  modified_base 89: mod_base = OTHER; note = 2'-O-methyl guanosine
  modified_base 90: mod_base = OTHER; note = 2'-O-methyl uridine
  modified_base 91: mod_base = OTHER; note = 2'-O-methyl cytidine
  modified_base 92: mod_base = OTHER; note = 2'-O-methyl guanosine
  modified_base 93: mod_base = OTHER; note = 2'-O-methyl guanosine
  modified_base 94: mod_base = OTHER; note = 2'-O-methyl uridine
  modified_base 95: mod_base = OTHER; note = 2'-O-methyl guanosine
  modified_base 96: mod_base = OTHER; note = 2'-O-methyl cytidine
  modified_base 118: mod_base = OTHER; note = cytidine phosphorothioate
  modified_base 119: mod_base = OTHER; note = 2'-O-methyl uridine phosphorothioate
  modified_base 120: mod_base = OTHER; note = 2'-O-methyl guanosine phosphorothioate
  modified_base 121: mod_base = OTHER; note = 2'-O-methyl cytidine
gtaacggcagacttctccacgttttagagctagaaatagcaagttaaaataaggctagtccgttatcaacttgaaaaagtggcaccgagtcggtgcacctgactcccgacgagaagtctgc

SEQ ID NO: 20949 - RNA, 121 nt, synthetic construct
  source 1..121: mol_type = other RNA
  modified_base 1: mod_base = OTHER; note = 2'-O-methyl guanosine phosphorothioate
  modified_base 2: mod_base = OTHER; note = 2'-O-methyl uridine phosphorothioate
  modified_base 3: mod_base = OTHER; note = 2'-O-methyl adenosine phosphorothioate
  modified_base 29: mod_base = OTHER; note = 2'-O-methyl guanosine
  modified_base 30: mod_base = OTHER; note = 2'-O-methyl cytidine
  modified_base 31: mod_base = OTHER; note = 2'-O-methyl uridine
  modified_base 32: mod_base = OTHER; note = 2'-O-methyl adenosine
  modified_base 33: mod_base = OTHER; note = 2'-O-methyl guanosine
  modified_base 34: mod_base = OTHER; note = 2'-O-methyl adenosine
  modified_base 35: mod_base = OTHER; note = 2'-O-methyl adenosine
  modified_base 36: mod_base = OTHER; note = 2'-O-methyl adenosine
  modified_base 37: mod_base = OTHER; note = 2'-O-methyl uridine
  modified_base 38: mod_base = OTHER; note = 2'-O-methyl adenosine
  modified_base 39: mod_base = OTHER; note = 2'-O-methyl guanosine
  modified_base 40: mod_base = OTHER; note = 2'-O-methyl cytidine
  modified_base 69: mod_base = OTHER; note = 2'-O-methyl adenosine
  modified_base 70: mod_base = OTHER; note = 2'-O-methyl cytidine
  modified_base 71: mod_base = OTHER; note = 2'-O-methyl uridine
  modified_base 72: mod_base = OTHER; note = 2'-O-methyl uridine
  modified_base 73: mod_base = OTHER; note = 2'-O-methyl guanosine
  modified_base 74: mod_base = OTHER; note = 2'-O-methyl adenosine
  modified_base 75: mod_base = OTHER; note = 2'-O-methyl adenosine
  modified_base 76: mod_base = OTHER; note = 2'-O-methyl adenosine
  modified_base 77: mod_base = OTHER; note = 2'-O-methyl adenosine
  modified_base 78: mod_base = OTHER; note = 2'-O-methyl adenosine
  modified_base 79: mod_base = OTHER; note = 2'-O-methyl guanosine
  modified_base 80: mod_base = OTHER; note = 2'-O-methyl uridine
  modified_base 81: mod_base = OTHER; note = 2'-O-methyl guanosine
  modified_base 82: mod_base = OTHER; note = 2'-O-methyl guanosine
  modified_base 83: mod_base = OTHER; note = 2'-O-methyl cytidine
  modified_base 84: mod_base = OTHER; note = 2'-O-methyl adenosine
  modified_base 85: mod_base = OTHER; note = 2'-O-methyl cytidine
  modified_base 86: mod_base = OTHER; note = 2'-O-methyl cytidine
  modified_base 87: mod_base = OTHER; note = 2'-O-methyl guanosine
  modified_base 88: mod_base = OTHER; note = 2'-O-methyl adenosine
  modified_base 89: mod_base = OTHER; note = 2'-O-methyl guanosine
  modified_base 90: mod_base = OTHER; note = 2'-O-methyl uridine
  modified_base 91: mod_base = OTHER; note = 2'-O-methyl cytidine
  modified_base 92: mod_base = OTHER; note = 2'-O-methyl guanosine
  modified_base 93: mod_base = OTHER; note = 2'-O-methyl guanosine
  modified_base 94: mod_base = OTHER; note = 2'-O-methyl uridine
  modified_base 95: mod_base = OTHER; note = 2'-O-methyl guanosine
  modified_base 96: mod_base = OTHER; note = 2'-O-methyl cytidine
  modified_base 118: mod_base = OTHER; note = cytidine phosphorothioate
  modified_base 119: mod_base = OTHER; note = 2'-O-methyl uridine phosphorothioate
  modified_base 120: mod_base = OTHER; note = 2'-O-methyl guanosine phosphorothioate
  modified_base 121: mod_base = OTHER; note = 2'-O-methyl cytidine
gtaacggcagacttctccacgttttagagctagaaatagcaagttaaaataaggctagtccgttatcaacttgaaaaagtggcaccgagtcggtgcacctgactcccgcggagaagtctgc

SEQ ID NO: 20950 - RNA, 121 nt, synthetic construct
  source 1..121: mol_type = other RNA
  modified_base 1: mod_base = OTHER; note = 2'-O-methyl guanosine phosphorothioate
  modified_base 2: mod_base = OTHER; note = 2'-O-methyl uridine phosphorothioate
  modified_base 3: mod_base = OTHER; note = 2'-O-methyl adenosine phosphorothioate
  modified_base 29: mod_base = OTHER; note = 2'-O-methyl guanosine
  modified_base 30: mod_base = OTHER; note = 2'-O-methyl cytidine
  modified_base 31: mod_base = OTHER; note = 2'-O-methyl uridine
  modified_base 32: mod_base = OTHER; note = 2'-O-methyl adenosine
  modified_base 33: mod_base = OTHER; note = 2'-O-methyl guanosine
  modified_base 34: mod_base = OTHER; note = 2'-O-methyl adenosine
  modified_base 35: mod_base = OTHER; note = 2'-O-methyl adenosine
  modified_base 36: mod_base = OTHER; note = 2'-O-methyl adenosine
  modified_base 37: mod_base = OTHER; note = 2'-O-methyl uridine
  modified_base 38: mod_base = OTHER; note = 2'-O-methyl adenosine
  modified_base 39: mod_base = OTHER; note = 2'-O-methyl guanosine
  modified_base 40: mod_base = OTHER; note = 2'-O-methyl cytidine
  modified_base 69: mod_base = OTHER; note = 2'-O-methyl adenosine
  modified_base 70: mod_base = OTHER; note = 2'-O-methyl cytidine
  modified_base 71: mod_base = OTHER; note = 2'-O-methyl uridine
  modified_base 72: mod_base = OTHER; note = 2'-O-methyl uridine
  modified_base 73: mod_base = OTHER; note = 2'-O-methyl guanosine
  modified_base 74: mod_base = OTHER; note = 2'-O-methyl adenosine
  modified_base 75: mod_base = OTHER; note = 2'-O-methyl adenosine
  modified_base 76: mod_base = OTHER; note = 2'-O-methyl adenosine
  modified_base 77: mod_base = OTHER; note = 2'-O-methyl adenosine
  modified_base 78: mod_base = OTHER; note = 2'-O-methyl adenosine
  modified_base 79: mod_base = OTHER; note = 2'-O-methyl guanosine
  modified_base 80: mod_base = OTHER; note = 2'-O-methyl uridine
  modified_base 81: mod_base = OTHER; note = 2'-O-methyl guanosine
  modified_base 82: mod_base = OTHER; note = 2'-O-methyl guanosine
  modified_base 83: mod_base = OTHER; note = 2'-O-methyl cytidine
  modified_base 84: mod_base = OTHER; note = 2'-O-methyl adenosine
  modified_base 85: mod_base = OTHER; note = 2'-O-methyl cytidine
  modified_base 86: mod_base = OTHER; note = 2'-O-methyl cytidine
  modified_base 87: mod_base = OTHER; note = 2'-O-methyl guanosine
  modified_base 88: mod_base = OTHER; note = 2'-O-methyl adenosine
  modified_base 89: mod_base = OTHER; note = 2'-O-methyl guanosine
  modified_base 90: mod_base = OTHER; note = 2'-O-methyl uridine
  modified_base 91: mod_base = OTHER; note = 2'-O-methyl cytidine
  modified_base 92: mod_base = OTHER; note = 2'-O-methyl guanosine
  modified_base 93: mod_base = OTHER; note = 2'-O-methyl guanosine
  modified_base 94: mod_base = OTHER; note = 2'-O-methyl uridine
  modified_base 95: mod_base = OTHER; note = 2'-O-methyl guanosine
  modified_base 96: mod_base = OTHER; note = 2'-O-methyl cytidine
  modified_base 118: mod_base = OTHER; note = cytidine phosphorothioate
  modified_base 119: mod_base = OTHER; note = 2'-O-methyl uridine phosphorothioate
  modified_base 120: mod_base = OTHER; note = 2'-O-methyl guanosine phosphorothioate
  modified_base 121: mod_base = OTHER; note = 2'-O-methyl cytidine
gtaacggcagacttctccacgttttagagctagaaatagcaagttaaaataaggctagtccgttatcaacttgaaaaagtggcaccgagtcggtgcacctgactcccgaggagaagtctgc

SEQ ID NO: 20951 - RNA, 120 nt, synthetic construct
  source 1..120: mol_type = other RNA
  modified_base 1: mod_base = OTHER; note = 2'-O-methyl cytidine phosphorothioate
  modified_base 2: mod_base = OTHER; note = 2'-O-methyl adenosine phosphorothioate
  modified_base 3: mod_base = OTHER; note = 2'-O-methyl uridine phosphorothioate
  modified_base 29: mod_base = OTHER; note = 2'-O-methyl guanosine
  modified_base 30: mod_base = OTHER; note = 2'-O-methyl cytidine
  modified_base 31: mod_base = OTHER; note = 2'-O-methyl uridine
  modified_base 32: mod_base = OTHER; note = 2'-O-methyl adenosine
  modified_base 33: mod_base = OTHER; note = 2'-O-methyl guanosine
  modified_base 34: mod_base = OTHER; note = 2'-O-methyl adenosine
  modified_base 35: mod_base = OTHER; note = 2'-O-methyl adenosine
  modified_base 36: mod_base = OTHER; note = 2'-O-methyl adenosine
  modified_base 37: mod_base = OTHER; note = 2'-O-methyl uridine
  modified_base 38: mod_base = OTHER; note = 2'-O-methyl adenosine
  modified_base 39: mod_base = OTHER; note = 2'-O-methyl guanosine
  modified_base 40: mod_base = OTHER; note = 2'-O-methyl cytidine
  modified_base 69: mod_base = OTHER; note = 2'-O-methyl adenosine
  modified_base 70: mod_base = OTHER; note = 2'-O-methyl cytidine
  modified_base 71: mod_base = OTHER; note = 2'-O-methyl uridine
  modified_base 72: mod_base = OTHER; note = 2'-O-methyl uridine
  modified_base 73: mod_base = OTHER; note = 2'-O-methyl guanosine
  modified_base 74: mod_base = OTHER; note = 2'-O-methyl adenosine
  modified_base 75: mod_base = OTHER; note = 2'-O-methyl adenosine
  modified_base 76: mod_base = OTHER; note = 2'-O-methyl adenosine
  modified_base 77: mod_base = OTHER; note = 2'-O-methyl adenosine
  modified_base 78: mod_base = OTHER; note = 2'-O-methyl adenosine
  modified_base 79: mod_base = OTHER; note = 2'-O-methyl guanosine
  modified_base 80: mod_base = OTHER; note = 2'-O-methyl uridine
  modified_base 81: mod_base = OTHER; note = 2'-O-methyl guanosine
  modified_base 82: mod_base = OTHER; note = 2'-O-methyl guanosine
  modified_base 83: mod_base = OTHER; note = 2'-O-methyl cytidine
  modified_base 84: mod_base = OTHER; note = 2'-O-methyl adenosine
  modified_base 85: mod_base = OTHER; note = 2'-O-methyl cytidine
  modified_base 86: mod_base = OTHER; note = 2'-O-methyl cytidine
  modified_base 87: mod_base = OTHER; note = 2'-O-methyl guanosine
  modified_base 88: mod_base = OTHER; note = 2'-O-methyl adenosine
  modified_base 89: mod_base = OTHER; note = 2'-O-methyl guanosine
  modified_base 90: mod_base = OTHER; note = 2'-O-methyl uridine
  modified_base 91: mod_base = OTHER; note = 2'-O-methyl cytidine
  modified_base 92: mod_base = OTHER; note = 2'-O-methyl guanosine
  modified_base 93: mod_base = OTHER; note = 2'-O-methyl guanosine
  modified_base 94: mod_base = OTHER; note = 2'-O-methyl uridine
  modified_base 95: mod_base = OTHER; note = 2'-O-methyl guanosine
  modified_base 96: mod_base = OTHER; note = 2'-O-methyl cytidine
  modified_base 117: mod_base = OTHER; note = guanosine phosphorothioate
  modified_base 118: mod_base = OTHER; note = 2'-O-methyl guanosine phosphorothioate
  modified_base 119: mod_base = OTHER; note = 2'-O-methyl uridine phosphorothioate
  modified_base 120: mod_base = OTHER; note = 2'-O-methyl guanosine
catggtgcacctgactcctggttttagagctagaaatagcaagttaaaataaggctagtccgttatcaacttgaaaaagtggcaccgagtcggtgcagacttctcagccggagtcaggtg

SEQ ID NO: 20952 - RNA, 120 nt, synthetic construct
  source 1..120: mol_type = other RNA
  modified_base 1: mod_base = OTHER; note = 2'-O-methyl cytidine phosphorothioate
  modified_base 2: mod_base = OTHER; note = 2'-O-methyl adenosine phosphorothioate
  modified_base 3: mod_base = OTHER; note = 2'-O-methyl uridine phosphorothioate
  modified_base 29: mod_base = OTHER; note = 2'-O-methyl guanosine
  modified_base 30: mod_base = OTHER; note = 2'-O-methyl cytidine
  modified_base 31: mod_base = OTHER; note = 2'-O-methyl uridine
  modified_base 32: mod_base = OTHER; note = 2'-O-methyl adenosine
  modified_base 33: mod_base = OTHER; note = 2'-O-methyl guanosine
  modified_base 34: mod_base = OTHER; note = 2'-O-methyl adenosine
  modified_base 35: mod_base = OTHER; note = 2'-O-methyl adenosine
  modified_base 36: mod_base = OTHER; note = 2'-O-methyl adenosine
  modified_base 37: mod_base = OTHER; note = 2'-O-methyl uridine
  modified_base 38: mod_base = OTHER; note = 2'-O-methyl adenosine
  modified_base 39: mod_base = OTHER; note = 2'-O-methyl guanosine
  modified_base 40: mod_base = OTHER; note = 2'-O-methyl cytidine
  modified_base 69: mod_base = OTHER; note = 2'-O-methyl adenosine
  modified_base 70: mod_base = OTHER; note = 2'-O-methyl cytidine
  modified_base 71: mod_base = OTHER; note = 2'-O-methyl uridine
  modified_base 72: mod_base = OTHER; note = 2'-O-methyl uridine
  modified_base 73: mod_base = OTHER; note = 2'-O-methyl guanosine
  modified_base 74: mod_base = OTHER; note = 2'-O-methyl adenosine
  modified_base 75: mod_base = OTHER; note = 2'-O-methyl adenosine
  modified_base 76: mod_base = OTHER; note = 2'-O-methyl adenosine
  modified_base 77: mod_base = OTHER; note = 2'-O-methyl adenosine
  modified_base 78: mod_base = OTHER; note = 2'-O-methyl adenosine
  modified_base 79: mod_base = OTHER; note = 2'-O-methyl guanosine
  modified_base 80: mod_base = OTHER; note = 2'-O-methyl uridine
  modified_base 81: mod_base = OTHER; note = 2'-O-methyl guanosine
  modified_base 82: mod_base = OTHER; note = 2'-O-methyl guanosine
  modified_base 83: mod_base = OTHER; note = 2'-O-methyl cytidine
  modified_base 84: mod_base = OTHER; note = 2'-O-methyl adenosine
  modified_base 85: mod_base = OTHER; note = 2'-O-methyl cytidine
  modified_base 86: mod_base = OTHER; note = 2'-O-methyl cytidine
  modified_base 87: mod_base = OTHER; note = 2'-O-methyl guanosine
  modified_base 88: mod_base = OTHER; note = 2'-O-methyl adenosine
  modified_base 89: mod_base = OTHER; note = 2'-O-methyl guanosine
  modified_base 90: mod_base = OTHER; note = 2'-O-methyl uridine
  modified_base 91: mod_base = OTHER; note = 2'-O-methyl cytidine
  modified_base 92: mod_base = OTHER; note = 2'-O-methyl guanosine
  modified_base 93: mod_base = OTHER; note = 2'-O-methyl guanosine
  modified_base 94: mod_base = OTHER; note = 2'-O-methyl uridine
  modified_base 95: mod_base = OTHER; note = 2'-O-methyl guanosine
  modified_base 96: mod_base = OTHER; note = 2'-O-methyl cytidine
  modified_base 117: mod_base = OTHER; note = guanosine phosphorothioate
  modified_base 118: mod_base = OTHER; note = 2'-O-methyl guanosine phosphorothioate
  modified_base 119: mod_base = OTHER; note = 2'-O-methyl uridine phosphorothioate
  modified_base 120: mod_base = OTHER; note = 2'-O-methyl guanosine
catggtgcacctgactcctggttttagagctagaaatagcaagttaaaataaggctagtccgttatcaacttgaaaaagtggcaccgagtcggtgcagacttctcggccggagtcaggtg

SEQ ID NO: 20953 - skipped

SEQ ID NO: 20954 - DNA, 23 bp, synthetic construct
  source 1..23: mol_type = other DNA
agtaacggcagacttctcttcag

SEQ ID NO: 20955 - DNA, 23 bp, synthetic construct
  source 1..23: mol_type = other DNA
agtaacggcagacttctctgcag

SEQ ID NO: 20956 - DNA, 23 bp, synthetic construct
  source 1..23: mol_type = other DNA
ccatggtgcacctgactcctgag

SEQ ID NO: 20957 - DNA, 17 bp, synthetic construct
  source 1..17: mol_type = other DNA
gagaagtctgccgttac

SEQ ID NO: 20958 - DNA, 136 bp, synthetic construct
  source 1..136: mol_type = other DNA
catggtgcacctgactcctggttttagagctagaaatagcaagttaaaataaggctagtccgttatcaacttgaaaaagtggcaccgagtcggtgcagtaacggcagacttctcttcaggagtcaggtgcaccatg

SEQ ID NO: 20959 - DNA, 135 bp, synthetic construct
  source 1..135: mol_type = other DNA
catggtgcacctgactcctggttttagagctagaaatagcaagttaaaataaggctagtccgttatcaacttgaaaaagtggcaccgagtcggtgcagtaacggcagacttctcttcaggagtcaggtgcaccat

SEQ ID NO: 20960 - DNA, 134 bp, synthetic construct
  source 1..134: mol_type = other DNA
catggtgcacctgactcctggttttagagctagaaatagcaagttaaaataaggctagtccgttatcaacttgaaaaagtggcaccgagtcggtgcagtaacggcagacttctcttcaggagtcaggtgcacca

SEQ ID NO: 20961 - DNA, 133 bp, synthetic construct
  source 1..133: mol_type = other DNA
catggtgcacctgactcctggttttagagctagaaatagcaagttaaaataaggctagtccgttatcaacttgaaaaagtggcaccgagtcggtgcagtaacggcagacttctcttcaggagtcaggtgcacc

SEQ ID NO: 20962 - DNA, 132 bp, synthetic construct
  source 1..132: mol_type = other DNA
catggtgcacctgactcctggttttagagctagaaatagcaagttaaaataaggctagtccgttatcaacttgaaaaagtggcaccgagtcggtgcagtaacggcagacttctcttcaggagtcaggtgcac

SEQ ID NO: 20963 - DNA, 131 bp, synthetic construct
  source 1..131: mol_type = other DNA
catggtgcacctgactcctggttttagagctagaaatagcaagttaaaataaggctagtccgttatcaacttgaaaaagtggcaccgagtcggtgcagtaacggcagacttctcttcaggagtcaggtgca

SEQ ID NO: 20964 - DNA, 130 bp, synthetic construct
  source 1..130: mol_type = other DNA
catggtgcacctgactcctggttttagagctagaaatagcaagttaaaataaggctagtccgttatcaacttgaaaaagtggcaccgagtcggtgcagtaacggcagacttctcttcaggagtcaggtgc

SEQ ID NO: 20965 - DNA, 129 bp, synthetic construct
  source 1..129: mol_type = other DNA
catggtgcacctgactcctggttttagagctagaaatagcaagttaaaataaggctagtccgttatcaacttgaaaaagtggcaccgagtcggtgcagtaacggcagacttctcttcaggagtcaggtg

SEQ ID NO: 20966 - DNA, 128 bp, synthetic construct
  source 1..128: mol_type = other DNA
catggtgcacctgactcctggttttagagctagaaatagcaagttaaaataaggctagtccgttatcaacttgaaaaagtggcaccgagtcggtgcagtaacggcagacttctcttcaggagtcaggt

SEQ ID NO: 20967 - DNA, 127 bp, synthetic construct
  source 1..127: mol_type = other DNA
catggtgcacctgactcctggttttagagctagaaatagcaagttaaaataaggctagtccgttatcaacttgaaaaagtggcaccgagtcggtgcagtaacggcagacttctcttcaggagtcagg

SEQ ID NO: 20968 - DNA, 135 bp, synthetic construct
  source 1..135: mol_type = other DNA
catggtgcacctgactcctggttttagagctagaaatagcaagttaaaataaggctagtccgttatcaacttgaaaaagtggcaccgagtcggtgcgtaacggcagacttctcttcaggagtcaggtgcaccatg

SEQ ID NO: 20969 - DNA, 134 bp, synthetic construct
  source 1..134: mol_type = other DNA
catggtgcacctgactcctggttttagagctagaaatagcaagttaaaataaggctagtccgttatcaacttgaaaaagtggcaccgagtcggtgcgtaacggcagacttctcttcaggagtcaggtgcaccat

SEQ ID NO: 20970 - DNA, 133 bp, synthetic construct
  source 1..133: mol_type = other DNA
catggtgcacctgactcctggttttagagctagaaatagcaagttaaaataaggctagtccgttatcaacttgaaaaagtggcaccgagtcggtgcgtaacggcagacttctcttcaggagtcaggtgcacca

SEQ ID NO: 20971 - DNA, 132 bp, synthetic construct
  source 1..132: mol_type = other DNA
catggtgcacctgactcctggttttagagctagaaatagcaagttaaaataaggctagtccgttatcaacttgaaaaagtggcaccgagtcggtgcgtaacggcagacttctcttcaggagtcaggtgcacc

SEQ ID NO: 20972 - DNA, 131 bp, synthetic construct
  source 1..131: mol_type = other DNA
catggtgcacctgactcctggttttagagctagaaatagcaagttaaaataaggctagtccgttatcaacttgaaaaagtggcaccgagtcggtgcgtaacggcagacttctcttcaggagtcaggtgcac

SEQ ID NO: 20973 - DNA, 130 bp, synthetic construct
  source 1..130: mol_type = other DNA
catggtgcacctgactcctggttttagagctagaaatagcaagttaaaataaggctagtccgttatcaacttgaaaaagtggcaccgagtcggtgcgtaacggcagacttctcttcaggagtcaggtgca

SEQ ID NO: 20974 - DNA, 129 bp, synthetic construct
  source 1..129: mol_type = other DNA
catggtgcacctgactcctggttttagagctagaaatagcaagttaaaataaggctagtccgttatcaacttgaaaaagtggcaccgagtcggtgcgtaacggcagacttctcttcaggagtcaggtgc

SEQ ID NO: 20975 - DNA, 128 bp, synthetic construct
  source 1..128: mol_type = other DNA
catggtgcacctgactcctggttttagagctagaaatagcaagttaaaataaggctagtccgttatcaacttgaaaaagtggcaccgagtcggtgcgtaacggcagacttctcttcaggagtcaggtg

SEQ ID NO: 20976 - DNA, 127 bp, synthetic construct
  source 1..127: mol_type = other DNA
catggtgcacctgactcctggttttagagctagaaatagcaagttaaaataaggctagtccgttatcaacttgaaaaagtggcaccgagtcggtgcgtaacggcagacttctcttcaggagtcaggt

SEQ ID NO: 20977 - DNA, 126 bp, synthetic construct
  source 1..126: mol_type = other DNA
catggtgcacctgactcctggttttagagctagaaatagcaagttaaaataaggctagtccgttatcaacttgaaaaagtggcaccgagtcggtgcgtaacggcagacttctcttcaggagtcagg

SEQ ID NO: 20978 - DNA, 134 bp, synthetic construct
  source 1..134: mol_type = other DNA
catggtgcacctgactcctggttttagagctagaaatagcaagttaaaataaggctagtccgttatcaacttgaaaaagtggcaccgagtcggtgctaacggcagacttctcttcaggagtcaggtgcaccatg

SEQ ID NO: 20979 - DNA, 133 bp, synthetic construct
  source 1..133: mol_type = other DNA
catggtgcacctgactcctggttttagagctagaaatagcaagttaaaataaggctagtccgttatcaacttgaaaaagtggcaccgagtcggtgctaacggcagacttctcttcaggagtcaggtgcaccat

SEQ ID NO: 20980 - DNA, 132 bp, synthetic construct
  source 1..132: mol_type = other DNA
catggtgcacctgactcctggttttagagctagaaatagcaagttaaaataaggctagtccgttatcaacttgaaaaagtggcaccgagtcggtgctaacggcagacttctcttcaggagtcaggtgcacca

SEQ ID NO: 20981 - DNA, 131 bp, synthetic construct
  source 1..131: mol_type = other DNA
catggtgcacctgactcctggttttagagctagaaatagcaagttaaaataaggctagtccgttatcaacttgaaaaagtggcaccgagtcggtgctaacggcagacttctcttcaggagtcaggtgcacc

SEQ ID NO: 20982 - DNA, 130 bp, synthetic construct
  source 1..130: mol_type = other DNA
catggtgcacctgactcctggttttagagctagaaatagcaagttaaaataaggctagtccgttatcaacttgaaaaagtggcaccgagtcggtgctaacggcagacttctcttcaggagtcaggtgcac

SEQ ID NO: 20983 - DNA, 129 bp, synthetic construct
  source 1..129: mol_type = other DNA
catggtgcacctgactcctggttttagagctagaaatagcaagttaaaataaggctagtccgttatcaacttgaaaaagtggcaccgagtcggtgctaacggcagacttctcttcaggagtcaggtgca

SEQ ID NO: 20984 - DNA, 128 bp, synthetic construct
  source 1..128: mol_type = other DNA
catggtgcacctgactcctggttttagagctagaaatagcaagttaaaataaggctagtccgttatcaacttgaaaaagtggcaccgagtcggtgctaacggcagacttctcttcaggagtcaggtgc

SEQ ID NO: 20985 - DNA, 127 bp, synthetic construct
  source 1..127: mol_type = other DNA
catggtgcacctgactcctggttttagagctagaaatagcaagttaaaataaggctagtccgttatcaacttgaaaaagtggcaccgagtcggtgctaacggcagacttctcttcaggagtcaggtg

SEQ ID NO: 20986 - DNA, 126 bp, synthetic construct
  source 1..126: mol_type = other DNA
catggtgcacctgactcctggttttagagctagaaatagcaagttaaaataaggctagtccgttatcaacttgaaaaagtggcaccgagtcggtgctaacggcagacttctcttcaggagtcaggt

SEQ ID NO: 20987 - DNA, 125 bp, synthetic construct
  source 1..125: mol_type = other DNA
catggtgcacctgactcctggttttagagctagaaatagcaagttaaaataaggctagtccgttatcaacttgaaaaagtggcaccgagtcggtgctaacggcagacttctcttcaggagtcagg

SEQ ID NO: 20988 - DNA, 133 bp, synthetic construct; identical to SEQ ID NO: 19611
  source 1..133: mol_type = other DNA

SEQ ID NO: 20989 - DNA, 132 bp, synthetic construct; identical to SEQ ID NO: 19612
  source 1..132: mol_type = other DNA

SEQ ID NO: 20990 - DNA, 131 bp, synthetic construct; identical to SEQ ID NO: 19613
  source 1..131: mol_type = other DNA

SEQ ID NO: 20991 - DNA, 130 bp, synthetic construct; identical to SEQ ID NO: 19614
  source 1..130: mol_type = other DNA

SEQ ID NO: 20992 - DNA, 129 bp, synthetic construct; identical to SEQ ID NO: 19615
  source 1..129: mol_type = other DNA

SEQ ID NO: 20993 - DNA, 128 bp, synthetic construct; identical to SEQ ID NO: 19616
  source 1..128: mol_type = other DNA

SEQ ID NO: 20994 - DNA, 127 bp, synthetic construct; identical to SEQ ID NO: 19617
  source 1..127: mol_type = other DNA

SEQ ID NO: 20995 - DNA, 126 bp, synthetic construct; identical to SEQ ID NO: 19618
  source 1..126: mol_type = other DNA

SEQ ID NO: 20996 - DNA, 125 bp, synthetic construct; identical to SEQ ID NO: 19619
  source 1..125: mol_type = other DNA

SEQ ID NO: 20997 - DNA, 124 bp, synthetic construct; identical to SEQ ID NO: 19620
  source 1..124: mol_type = other DNA

SEQ ID NO: 20998 - DNA, 132 bp, synthetic construct; identical to SEQ ID NO: 19621
  source 1..132: mol_type = other DNA

SEQ ID NO: 20999 - DNA, 131 bp, synthetic construct; identical to SEQ ID NO: 19622
  source 1..131: mol_type = other DNA

SEQ ID NO: 21000 - DNA, 130 bp, synthetic construct; identical to SEQ ID NO: 19623
  source 1..130: mol_type = other DNA

SEQ ID NO: 21001 - DNA, 129 bp, synthetic construct; identical to SEQ ID NO: 19624
  source 1..129: mol_type = other DNA

SEQ ID NO: 21002 - DNA, 128 bp, synthetic construct; identical to SEQ ID NO: 19625
  source 1..128: mol_type = other DNA

SEQ ID NO: 21003 - DNA, 127 bp, synthetic construct; identical to SEQ ID NO: 19626
  source 1..127: mol_type = other DNA

SEQ ID NO: 21004 - DNA, 126 bp, synthetic construct; identical to SEQ ID NO: 19627
  source 1..126: mol_type = other DNA

SEQ ID NO: 21005 - DNA, 125 bp, synthetic construct; identical to SEQ ID NO: 19628
  source 1..125: mol_type = other DNA

SEQ ID NO: 21006 - DNA, 124 bp, synthetic construct; identical to SEQ ID NO: 19629
  source 1..124: mol_type = other DNA

SEQ ID NO: 21007 - DNA, 123 bp, synthetic construct; identical to SEQ ID NO: 19630
  source 1..123: mol_type = other DNA

SEQ ID NO: 21008 - DNA, 131 bp, synthetic construct
  source 1..131: mol_type = other DNA
catggtgcacctgactcctggttttagagctagaaatagcaagttaaaataaggctagtccgttatcaacttgaaaaagtggcaccgagtcggtgccggcagacttctcttcaggagtcaggtgcaccatg

SEQ ID NO: 21009 - DNA, 130 bp, synthetic construct
  source 1..130: mol_type = other DNA
catggtgcacctgactcctggttttagagctagaaatagcaagttaaaataaggctagtccgttatcaacttgaaaaagtggcaccgagtcggtgccggcagacttctcttcaggagtcaggtgcaccat

SEQ ID NO: 21010 - DNA, 129 bp, synthetic construct
  source 1..129: mol_type = other DNA
catggtgcacctgactcctggttttagagctagaaatagcaagttaaaataaggctagtccgttatcaacttgaaaaagtggcaccgagtcggtgccggcagacttctcttcaggagtcaggtgcacca

SEQ ID NO: 21011 - DNA, 128 bp, synthetic construct
  source 1..128: mol_type = other DNA
catggtgcacctgactcctggttttagagctagaaatagcaagttaaaataaggctagtccgttatcaacttgaaaaagtggcaccgagtcggtgccggcagacttctcttcaggagtcaggtgcacc

SEQ ID NO: 21012 - DNA, 127 bp, synthetic construct
  source 1..127: mol_type = other DNA
catggtgcacctgactcctggttttagagctagaaatagcaagttaaaataaggctagtccgttatcaacttgaaaaagtggcaccgagtcggtgccggcagacttctcttcaggagtcaggtgcac

SEQ ID NO: 21013 - DNA, 126 bp, synthetic construct
  source 1..126: mol_type = other DNA
catggtgcacctgactcctggttttagagctagaaatagcaagttaaaataaggctagtccgttatcaacttgaaaaagtggcaccgagtcggtgccggcagacttctcttcaggagtcaggtgca

SEQ ID NO: 21014 - DNA, 125 bp, synthetic construct
  source 1..125: mol_type = other DNA
catggtgcacctgactcctggttttagagctagaaatagcaagttaaaataaggctagtccgttatcaacttgaaaaagtggcaccgagtcggtgccggcagacttctcttcaggagtcaggtgc

SEQ ID NO: 21015 - DNA, 124 bp, synthetic construct
  source 1..124: mol_type = other DNA
catggtgcacctgactcctggttttagagctagaaatagcaagttaaaataaggctagtccgttatcaacttgaaaaagtggcaccgagtcggtgccggcagacttctcttcaggagtcaggtg

SEQ ID NO: 21016 - DNA, 123 bp, synthetic construct
  source 1..123: mol_type = other DNA
catggtgcacctgactcctggttttagagctagaaatagcaagttaaaataaggctagtccgttatcaacttgaaaaagtggcaccgagtcggtgccggcagacttctcttcaggagtcaggt

SEQ ID NO: 21017 - DNA, 122 bp, synthetic construct
  source 1..122: mol_type = other DNA
catggtgcacctgactcctggttttagagctagaaatagcaagttaaaataaggctagtccgttatcaacttgaaaaagtggcaccgagtcggtgccggcagacttctcttcaggagtcagg

SEQ ID NO: 21018 - DNA, 130 bp, synthetic construct; identical to SEQ ID NO: 19631
  source 1..130: mol_type = other DNA

SEQ ID NO: 21019 - DNA, 129 bp, synthetic construct; identical to SEQ ID NO: 19632
  source 1..129: mol_type = other DNA

SEQ ID NO: 21020 - DNA, 128 bp, synthetic construct; identical to SEQ ID NO: 19633
  source 1..128: mol_type = other DNA

SEQ ID NO: 21021 - DNA, 127 bp, synthetic construct; identical to SEQ ID NO: 19634
  source 1..127: mol_type = other DNA

SEQ ID NO: 21022 - DNA, 126 bp, synthetic construct; identical to SEQ ID NO: 19635
  source 1..126: mol_type = other DNA

SEQ ID NO: 21023 - DNA, 125 bp, synthetic construct; identical to SEQ ID NO: 19636
  source 1..125: mol_type = other DNA

SEQ ID NO: 21024 - DNA, 124 bp, synthetic construct; identical to SEQ ID NO: 19637
  source 1..124: mol_type = other DNA

SEQ ID NO: 21025 - DNA, 123 bp, synthetic construct; identical to SEQ ID NO: 19638
  source 1..123: mol_type = other DNA

SEQ ID NO: 21026 - DNA, 122 bp, synthetic construct; identical to SEQ ID NO: 19639
  source 1..122: mol_type = other DNA

SEQ ID NO: 21027 - DNA, 121 bp, synthetic construct; identical to SEQ ID NO: 19640
  source 1..121: mol_type = other DNA

SEQ ID NO: 21028 - DNA, 129 bp, synthetic construct; identical to SEQ ID NO: 19641
  source 1..129: mol_type = other DNA

SEQ ID NO: 21029 - DNA, 128 bp, synthetic construct; identical to SEQ ID NO: 19642
  source 1..128: mol_type = other DNA

SEQ ID NO: 21030 - DNA, 127 bp, synthetic construct; identical to SEQ ID NO: 19643
  source 1..127: mol_type = other DNA

SEQ ID NO: 21031 - DNA, 126 bp, synthetic construct; identical to SEQ ID NO: 19644
  source 1..126: mol_type = other DNA

SEQ ID NO: 21032 - DNA, 125 bp, synthetic construct; identical to SEQ ID NO: 19645
  source 1..125: mol_type = other DNA

SEQ ID NO: 21033 - DNA, 124 bp, synthetic construct; identical to SEQ ID NO: 19646
  source 1..124: mol_type = other DNA

SEQ ID NO: 21034 - DNA, 123 bp, synthetic construct; identical to SEQ ID NO: 19647
  source 1..123: mol_type = other DNA

SEQ ID NO: 21035 - DNA, 122 bp, synthetic construct; identical to SEQ ID NO: 19648
  source 1..122: mol_type = other DNA

SEQ ID NO: 21036 - DNA, 121 bp, synthetic construct; identical to SEQ ID NO: 19649
  source 1..121: mol_type = other DNA

SEQ ID NO: 21037 - DNA, 120 bp, synthetic construct; identical to SEQ ID NO: 19650
  source 1..120: mol_type = other DNA

SEQ ID NO: 21038 - DNA, 128 bp, synthetic construct
  source 1..128: mol_type = other DNA
catggtgcacctgactcctggttttagagctagaaatagcaagttaaaataaggctagtccgttatcaacttgaaaaagtggcaccgagtcggtgccagacttctcttcaggagtcaggtgcaccatg

SEQ ID NO: 21039 - DNA, 127 bp, synthetic construct
  source 1..127: mol_type = other DNA
catggtgcacctgactcctggttttagagctagaaatagcaagttaaaataaggctagtccgttatcaacttgaaaaagtggcaccgagtcggtgccagacttctcttcaggagtcaggtgcaccat

SEQ ID NO: 21040 - DNA, 126 bp, synthetic construct
  source 1..126: mol_type = other DNA
catggtgcacctgactcctggttttagagctagaaatagcaagttaaaataaggctagtccgttatcaacttgaaaaagtggcaccgagtcggtgccagacttctcttcaggagtcaggtgcacca

SEQ ID NO: 21041 - DNA, 125 bp, synthetic construct
  source 1..125: mol_type = other DNA
catggtgcacctgactcctggttttagagctagaaatagcaagttaaaataaggctagtccgttatcaacttgaaaaagtggcaccgagtcggtgccagacttctcttcaggagtcaggtgcacc

SEQ ID NO: 21042 - DNA, 124 bp, synthetic construct
  source 1..124: mol_type = other DNA
catggtgcacctgactcctggttttagagctagaaatagcaagttaaaataaggctagtccgttatcaacttgaaaaagtggcaccgagtcggtgccagacttctcttcaggagtcaggtgcac

SEQ ID NO: 21043 - DNA, 123 bp, synthetic construct
  source 1..123: mol_type = other DNA
catggtgcacctgactcctggttttagagctagaaatagcaagttaaaataaggctagtccgttatcaacttgaaaaagtggcaccgagtcggtgccagacttctcttcaggagtcaggtgca

SEQ ID NO: 21044 - DNA, 122 bp, synthetic construct
  source 1..122: mol_type = other DNA
catggtgcacctgactcctggttttagagctagaaatagcaagttaaaataaggctagtccgttatcaacttgaaaaagtggcaccgagtcggtgccagacttctcttcaggagtcaggtgc

SEQ ID NO: 21045 - DNA, 121 bp, synthetic construct
  source 1..121: mol_type = other DNA
catggtgcacctgactcctggttttagagctagaaatagcaagttaaaataaggctagtccgttatcaacttgaaaaagtggcaccgagtcggtgccagacttctcttcaggagtcaggtg

SEQ ID NO: 21046 - DNA, 120 bp, synthetic construct
  source 1..120: mol_type = other DNA
catggtgcacctgactcctggttttagagctagaaatagcaagttaaaataaggctagtccgttatcaacttgaaaaagtggcaccgagtcggtgccagacttctcttcaggagtcaggt

SEQ ID NO: 21047 - DNA, 119 bp, synthetic construct
  source 1..119: mol_type = other DNA
catggtgcacctgactcctggttttagagctagaaatagcaagttaaaataaggctagtccgttatcaacttgaaaaagtggcaccgagtcggtgccagacttctcttcaggagtcagg

SEQ ID NO: 21048 - DNA, 127 bp, synthetic construct; identical to SEQ ID NO: 19651
  source 1..127: mol_type = other DNA

SEQ ID NO: 21049 - DNA, 126 bp, synthetic construct; identical to SEQ ID NO: 19652
  source 1..126: mol_type = other DNA

SEQ ID NO: 21050 - DNA, 125 bp, synthetic construct; identical to SEQ ID NO: 19653
  source 1..125: mol_type = other DNA

SEQ ID NO: 21051 - DNA, 124 bp, synthetic construct; identical to SEQ ID NO: 19654
  source 1..124: mol_type = other DNA

SEQ ID NO: 21052 - DNA, 123 bp, synthetic construct; identical to SEQ ID NO: 19655
  source 1..123: mol_type = other DNA

SEQ ID NO: 21053 - DNA, 122 bp, synthetic construct; identical to SEQ ID NO: 19656
  source 1..122: mol_type = other DNA

SEQ ID NO: 21054 - DNA, 121 bp, synthetic construct; identical to SEQ ID NO: 19657
  source 1..121: mol_type = other DNA

SEQ ID NO: 21055 - DNA, 120 bp, synthetic construct; identical to SEQ ID NO: 19658
  source 1..120: mol_type = other DNA

SEQ ID NO: 21056 - DNA, 119 bp, synthetic construct; identical to SEQ ID NO: 19659
  source 1..119: mol_type = other DNA

SEQ ID NO: 21057 - DNA, 118 bp, synthetic construct; identical to SEQ ID NO: 19660
  source 1..118: mol_type = other DNA

SEQ ID NO: 21058 - DNA, 126 bp, synthetic construct; identical to SEQ ID NO: 19661
  source 1..126: mol_type = other DNA

SEQ ID NO: 21059 - DNA, 125 bp, synthetic construct; identical to SEQ ID NO: 19662
  source 1..125: mol_type = other DNA

SEQ ID NO: 21060 - DNA, 124 bp, synthetic construct; identical to SEQ ID NO: 19663
  source 1..124: mol_type = other DNA

SEQ ID NO: 21061 - DNA, 123 bp, synthetic construct; identical to SEQ ID NO: 19664
  source 1..123: mol_type = other DNA

SEQ ID NO: 21062 - DNA, 122 bp, synthetic construct; identical to SEQ ID NO: 19665
  source 1..122: mol_type = other DNA

SEQ ID NO: 21063 - DNA, 121 bp, synthetic construct; identical to SEQ ID NO: 19666
  source 1..121: mol_type = other DNA

SEQ ID NO: 21064 - DNA, 120 bp, synthetic construct; identical to SEQ ID NO: 19667
  source 1..120: mol_type = other DNA

SEQ ID NO: 21065 - DNA, 119 bp, synthetic construct; identical to SEQ ID NO: 19668
  source 1..119: mol_type = other DNA

SEQ ID NO: 21066 - DNA, 118 bp, synthetic construct; identical to SEQ ID NO: 19669
  source 1..118: mol_type = other DNA

SEQ ID NO: 21067 - DNA, 117 bp, synthetic construct; identical to SEQ ID NO: 19670
  source 1..117: mol_type = other DNA

SEQ ID NO: 21068 - DNA, 125 bp, synthetic construct; identical to SEQ ID NO: 19671
  source 1..125: mol_type = other DNA

SEQ ID NO: 21069 - DNA, 124 bp, synthetic construct; identical to SEQ ID NO: 19672
  source 1..124: mol_type = other DNA

SEQ ID NO: 21070 - DNA, 123 bp, synthetic construct; identical to SEQ ID NO: 19673
  source 1..123: mol_type = other DNA

SEQ ID NO: 21071 - DNA, 122 bp, synthetic construct; identical to SEQ ID NO: 19674
  source 1..122: mol_type = other DNA

SEQ ID NO: 21072 - DNA, 121 bp, synthetic construct; identical to SEQ ID NO: 19675
  source 1..121: mol_type = other DNA

SEQ ID NO: 21073 - DNA, 120 bp, synthetic construct; identical to SEQ ID NO: 19676
  source 1..120: mol_type = other DNA

SEQ ID NO: 21074 - DNA, 119 bp, synthetic construct; identical to SEQ ID NO: 19677
  source 1..119: mol_type = other DNA

SEQ ID NO: 21075 - DNA, 118 bp, synthetic construct; identical to SEQ ID NO: 19678
  source 1..118: mol_type = other DNA

SEQ ID NO: 21076 - DNA, 117 bp, synthetic construct; identical to SEQ ID NO: 19679
  source 1..117: mol_type = other DNA

SEQ ID NO: 21077 - DNA, 116 bp, synthetic construct; identical to SEQ ID NO: 19680
  source 1..116: mol_type = other DNA

SEQ ID NO: 21078 - DNA, 124 bp, synthetic construct
  source 1..124: mol_type = other DNA
catggtgcacctgactcctggttttagagctagaaatagcaagttaaaataaggctagtccgttatcaacttgaaaaagtggcaccgagtcggtgccttctcttcaggagtcaggtgcaccatg

SEQ ID NO: 21079 - DNA, 123 bp, synthetic construct
  source 1..123: mol_type = other DNA
catggtgcacctgactcctggttttagagctagaaatagcaagttaaaataaggctagtccgttatcaacttgaaaaagtggcaccgagtcggtgccttctcttcaggagtcaggtgcaccat

SEQ ID NO: 21080 - DNA, 122 bp, synthetic construct
  source 1..122: mol_type = other DNA
catggtgcacctgactcctggttttagagctagaaatagcaagttaaaataaggctagtccgttatcaacttgaaaaagtggcaccgagtcggtgccttctcttcaggagtcaggtgcacca

SEQ ID NO: 21081 - DNA, 121 bp, synthetic construct
  source 1..121: mol_type = other DNA
catggtgcacctgactcctggttttagagctagaaatagcaagttaaaataaggctagtccgttatcaacttgaaaaagtggcaccgagtcggtgccttctcttcaggagtcaggtgcacc

SEQ ID NO: 21082 - DNA, 120 bp, synthetic construct
  source 1..120: mol_type = other DNA
catggtgcacctgactcctggttttagagctagaaatagcaagttaaaataaggctagtccgttatcaacttgaaaaagtggcaccgagtcggtgccttctcttcaggagtcaggtgcac

SEQ ID NO: 21083 - DNA, 119 bp, synthetic construct
  source 1..119: mol_type = other DNA
catggtgcacctgactcctggttttagagctagaaatagcaagttaaaataaggctagtccgttatcaacttgaaaaagtggcaccgagtcggtgccttctcttcaggagtcaggtgca

SEQ ID NO: 21084 - DNA, 118 bp, synthetic construct
  source 1..118: mol_type = other DNA
catggtgcacctgactcctggttttagagctagaaatagcaagttaaaataaggctagtccgttatcaacttgaaaaagtggcaccgagtcggtgccttctcttcaggagtcaggtgc

SEQ ID NO: 21085 - DNA, 117 bp, synthetic construct
  source 1..117: mol_type = other DNA
catggtgcacctgactcctggttttagagctagaaatagcaagttaaaataaggctagtccgttatcaacttgaaaaagtggcaccgagtcggtgccttctcttcaggagtcaggtg

SEQ ID NO: 21086 - DNA, 116 bp, synthetic construct
  source 1..116: mol_type = other DNA
catggtgcacctgactcctggttttagagctagaaatagcaagttaaaataaggctagtccgttatcaacttgaaaaagtggcaccgagtcggtgccttctcttcaggagtcaggt

SEQ ID NO: 21087 - DNA, 115 bp, synthetic construct
  source 1..115: mol_type = other DNA
catggtgcacctgactcctggttttagagctagaaatagcaagttaaaataaggctagtccgttatcaacttgaaaaagtggcaccgagtcggtgccttctcttcaggagtcagg

SEQ ID NO: 21088 - DNA, 123 bp, synthetic construct; identical to SEQ ID NO: 19681
  source 1..123: mol_type = other DNA

SEQ ID NO: 21089 - DNA, 122 bp, synthetic construct; identical to SEQ ID NO: 19682
  source 1..122: mol_type = other DNA

SEQ ID NO: 21090 - DNA, 121 bp, synthetic construct; identical to SEQ ID NO: 19683
  source 1..121: mol_type = other DNA

SEQ ID NO: 21091 - DNA, 120 bp, synthetic construct; identical to SEQ ID NO: 19684
  source 1..120: mol_type = other DNA

SEQ ID NO: 21092 - DNA, 119 bp, synthetic construct; identical to SEQ ID NO: 19685
  source 1..119: mol_type = other DNA

SEQ ID NO: 21093 - DNA, 118 bp, synthetic construct; identical to SEQ ID NO: 19686
  source 1..118: mol_type = other DNA

SEQ ID NO: 21094 - DNA, 117 bp, synthetic construct; identical to SEQ ID NO: 19687
  source 1..117: mol_type = other DNA

SEQ ID NO: 21095 - DNA, 116 bp, synthetic construct; identical to SEQ ID NO: 19688
  source 1..116: mol_type = other DNA

SEQ ID NO: 21096 - DNA, 115 bp, synthetic construct; identical to SEQ ID NO: 19689
  source 1..115: mol_type = other DNA

SEQ ID NO: 21097 - DNA, 114 bp, synthetic construct; identical to SEQ ID NO: 19690
  source 1..114: mol_type = other DNA

SEQ ID NO: 21098 - DNA, 122 bp, synthetic construct; identical to SEQ ID NO: 19691
  source 1..122: mol_type = other DNA

SEQ ID NO: 21099 - DNA, 121 bp, synthetic construct; identical to SEQ ID NO: 19692
  source 1..121: mol_type = other DNA

SEQ ID NO: 21100 - DNA, 120 bp, synthetic construct; identical to SEQ ID NO: 19693
  source 1..120: mol_type = other DNA

SEQ ID NO: 21101 - DNA, 119 bp, synthetic construct; identical to SEQ ID NO: 19694
  source 1..119: mol_type = other DNA

SEQ ID NO: 21102 - DNA, 118 bp, synthetic construct; identical to SEQ ID NO: 19695
  source 1..118: mol_type = other DNA

SEQ ID NO: 21103 - DNA, 117 bp, synthetic construct; identical to SEQ ID NO: 19696
  source 1..117: mol_type = other DNA

SEQ ID NO: 21104 - DNA, 116 bp, synthetic construct; identical to SEQ ID NO: 19697
  source 1..116: mol_type = other DNA

SEQ ID NO: 21105 - DNA, 115 bp, synthetic construct; identical to SEQ ID NO: 19698
  source 1..115: mol_type = other DNA

SEQ ID NO: 21106 - DNA, 114 bp, synthetic construct; identical to SEQ ID NO: 19699
  source 1..114: mol_type = other DNA

SEQ ID NO: 21107 - DNA, 113 bp, synthetic construct; identical to SEQ ID NO: 19700
  source 1..113: mol_type = other DNA

SEQ ID NO: 21108 - DNA, 121 bp, synthetic construct
  source 1..121: mol_type = other DNA
catggtgcacctgactcctggttttagagctagaaatagcaagttaaaataaggctagtccgttatcaacttgaaaaagtggcaccgagtcggtgcctcttcaggagtcaggtgcaccatg

SEQ ID NO: 21109 - DNA, 120 bp, synthetic construct
  source 1..120: mol_type = other DNA
catggtgcacctgactcctggttttagagctagaaatagcaagttaaaataaggctagtccgttatcaacttgaaaaagtggcaccgagtcggtgcctcttcaggagtcaggtgcaccat

SEQ ID NO: 21110 - DNA, 119 bp, synthetic construct
  source 1..119: mol_type = other DNA
catggtgcacctgactcctggttttagagctagaaatagcaagttaaaataaggctagtccgttatcaacttgaaaaagtggcaccgagtcggtgcctcttcaggagtcaggtgcacca

SEQ ID NO: 21111 - DNA, 118 bp, synthetic construct
  source 1..118: mol_type = other DNA
catggtgcacctgactcctggttttagagctagaaatagcaagttaaaataaggctagtccgttatcaacttgaaaaagtggcaccgagtcggtgcctcttcaggagtcaggtgcacc

SEQ ID NO: 21112 - DNA, 117 bp, synthetic construct
  source 1..117: mol_type = other DNA
catggtgcacctgactcctggttttagagctagaaatagcaagttaaaataaggctagtccgttatcaacttgaaaaagtggcaccgagtcggtgcctcttcaggagtcaggtgcac

SEQ ID NO: 21113 - DNA, 116 bp, synthetic construct
  source 1..116: mol_type = other DNA
catggtgcacctgactcctggttttagagctagaaatagcaagttaaaataaggctagtccgttatcaacttgaaaaagtggcaccgagtcggtgcctcttcaggagtcaggtgca

SEQ ID NO: 21114 - DNA, 115 bp, synthetic construct
  source 1..115: mol_type = other DNA
catggtgcacctgactcctggttttagagctagaaatagcaagttaaaataaggctagtccgttatcaacttgaaaaagtggcaccgagtcggtgcctcttcaggagtcaggtgc

SEQ ID NO: 21115 - DNA, 114 bp, synthetic construct
  source 1..114: mol_type = other DNA
catggtgcacctgactcctggttttagagctagaaatagcaagttaaaataaggctagtccgttatcaacttgaaaaagtggcaccgagtcggtgcctcttcaggagtcaggtg

SEQ ID NO: 21116 - DNA, 113 bp, synthetic construct
  source 1..113: mol_type = other DNA
catggtgcacctgactcctggttttagagctagaaatagcaagttaaaataaggctagtccgttatcaacttgaaaaagtggcaccgagtcggtgcctcttcaggagtcaggt

SEQ ID NO: 21117 - DNA, 112 bp, synthetic construct
  source 1..112: mol_type = other DNA
catggtgcacctgactcctggttttagagctagaaatagcaagttaaaataaggctagtccgttatcaacttgaaaaagtggcaccgagtcggtgcctcttcaggagtcagg

SEQ ID NO: 21118 - DNA, 136 bp, synthetic construct
  source 1..136: mol_type = other DNA
catggtgcacctgactcctggttttagagctagaaatagcaagttaaaataaggctagtccgttatcaacttgaaaaagtggcaccgagtcggtgcagtaacggcagacttctctgcaggagtcaggtgcaccatg

SEQ ID NO: 21119 - DNA, 135 bp, synthetic construct
  source 1..135: mol_type = other DNA
catggtgcacctgactcctggttttagagctagaaatagcaagttaaaataaggctagtccgttatcaacttgaaaaagtggcaccgagtcggtgcagtaacggcagacttctctgcaggagtcaggtgcaccat

SEQ ID NO: 21120 - DNA, 134 bp, synthetic construct
  source 1..134: mol_type = other DNA
catggtgcacctgactcctggttttagagctagaaatagcaagttaaaataaggctagtccgttatcaacttgaaaaagtggcaccgagtcggtgcagtaacggcagacttctctgcaggagtcaggtgcacca

SEQ ID NO: 21121 - DNA, 133 bp, synthetic construct
  source 1..133: mol_type = other DNA
catggtgcacctgactcctggttttagagctagaaatagcaagttaaaataaggctagtccgttatcaacttgaaaaagtggcaccgagtcggtgcagtaacggcagacttctctgcaggagtcaggtgcacc

SEQ ID NO: 21122 - DNA, 132 bp, synthetic construct
  source 1..132: mol_type = other DNA
catggtgcacctgactcctggttttagagctagaaatagcaagttaaaataaggctagtccgttatcaacttgaaaaagtggcaccgagtcggtgcagtaacggcagacttctctgcaggagtcaggtgcac

SEQ ID NO: 21123 - DNA, 131 bp, synthetic construct
  source 1..131: mol_type = other DNA
catggtgcacctgactcctggttttagagctagaaatagcaagttaaaataaggctagtccgttatcaacttgaaaaagtggcaccgagtcggtgcagtaacggcagacttctctgcaggagtcaggtgca

SEQ ID NO: 21124 - DNA, 130 bp, synthetic construct
  source 1..130: mol_type = other DNA
catggtgcacctgactcctggttttagagctagaaatagcaagttaaaataaggctagtccgttatcaacttgaaaaagtggcaccgagtcggtgcagtaacggcagacttctctgcaggagtcaggtgc

SEQ ID NO: 21125 - DNA, 129 bp, synthetic construct
  source 1..129: mol_type = other DNA
catggtgcacctgactcctggttttagagctagaaatagcaagttaaaataaggctagtccgttatcaacttgaaaaagtggcaccgagtcggtgcagtaacggcagacttctctgcaggagtcaggtg

SEQ ID NO: 21126 - DNA, 128 bp, synthetic construct
  source 1..128: mol_type = other DNA
catggtgcacctgactcctggttttagagctagaaatagcaagttaaaataaggctagtccgttatcaacttgaaaaagtggcaccgagtcggtgcagtaacggcagacttctctgcaggagtcaggt

SEQ ID NO: 21127 - DNA, 127 bp, synthetic construct
  source 1..127: mol_type = other DNA
catggtgcacctgactcctggttttagagctagaaatagcaagttaaaataaggctagtccgttatcaacttgaaaaagtggcaccgagtcggtgcagtaacggcagacttctctgcaggagtcagg

SEQ ID NO: 21128 - DNA, 135 bp, synthetic construct
  source 1..135: mol_type = other DNA
catggtgcacctgactcctggttttagagctagaaatagcaagttaaaataaggctagtccgttatcaacttgaaaaagtggcaccgagtcggtgcgtaacggcagacttctctgcaggagtcaggtgcaccatg

SEQ ID NO: 21129 - DNA, 134 bp, synthetic construct
  source 1..134: mol_type = other DNA
catggtgcacctgactcctggttttagagctagaaatagcaagttaaaataaggctagtccgttatcaacttgaaaaagtggcaccgagtcggtgcgtaacggcagacttctctgcaggagtcaggtgcaccat

SEQ ID NO: 21130 - DNA, 133 bp, synthetic construct
  source 1..133: mol_type = other DNA
catggtgcacctgactcctggttttagagctagaaatagcaagttaaaataaggctagtccgttatcaacttgaaaaagtggcaccgagtcggtgcgtaacggcagacttctctgcaggagtcaggtgcacca

SEQ ID NO: 21131 - DNA, 132 bp, synthetic construct
  source 1..132: mol_type = other DNA
catggtgcacctgactcctggttttagagctagaaatagcaagttaaaataaggctagtccgttatcaacttgaaaaagtggcaccgagtcggtgcgtaacggcagacttctctgcaggagtcaggtgcacc

SEQ ID NO: 21132 - DNA, 131 bp, synthetic construct
  source 1..131: mol_type = other DNA
catggtgcacctgactcctggttttagagctagaaatagcaagttaaaataaggctagtccgttatcaacttgaaaaagtggcaccgagtcggtgcgtaacggcagacttctctgcaggagtcaggtgcac

SEQ ID NO: 21133 - DNA, 130 bp, synthetic construct
  source 1..130: mol_type = other DNA
catggtgcacctgactcctggttttagagctagaaatagcaagttaaaataaggctagtccgttatcaacttgaaaaagtggcaccgagtcggtgcgtaacggcagacttctctgcaggagtcaggtgca

SEQ ID NO: 21134 - DNA, 129 bp, synthetic construct
  source 1..129: mol_type = other DNA
catggtgcacctgactcctggttttagagctagaaatagcaagttaaaataaggctagtccgttatcaacttgaaaaagtggcaccgagtcggtgcgtaacggcagacttctctgcaggagtcaggtgc

SEQ ID NO: 21135 - DNA, 128 bp, synthetic construct
  source 1..128: mol_type = other DNA
catggtgcacctgactcctggttttagagctagaaatagcaagttaaaataaggctagtccgttatcaacttgaaaaagtggcaccgagtcggtgcgtaacggcagacttctctgcaggagtcaggtg

SEQ ID NO: 21136 - DNA, 127 bp, synthetic construct
  source 1..127: mol_type = other DNA
catggtgcacctgactcctggttttagagctagaaatagcaagttaaaataaggctagtccgttatcaacttgaaaaagtggcaccgagtcggtgcgtaacggcagacttctctgcaggagtcaggt

SEQ ID NO: 21137 - DNA, 126 bp, synthetic construct
  source 1..126: mol_type = other DNA
catggtgcacctgactcctggttttagagctagaaatagcaagttaaaataaggctagtccgttatcaacttgaaaaagtggcaccgagtcggtgcgtaacggcagacttctctgcaggagtcagg

SEQ ID NO: 21138 - DNA, 134 bp, synthetic construct
  source 1..134: mol_type = other DNA
catggtgcacctgactcctggttttagagctagaaatagcaagttaaaataaggctagtccgttatcaacttgaaaaagtggcaccgagtcggtgctaacggcagacttctctgcaggagtcaggtgcaccatg

SEQ ID NO: 21139 - DNA, 133 bp, synthetic construct
  source 1..133: mol_type = other DNA
catggtgcacctgactcctggttttagagctagaaatagcaagttaaaataaggctagtccgttatcaacttgaaaaagtggcaccgagtcggtgctaacggcagacttctctgcaggagtcaggtgcaccat

SEQ ID NO: 21140 - DNA, 132 bp, synthetic construct
  source 1..132: mol_type = other DNA
catggtgcacctgactcctggttttagagctagaaatagcaagttaaaataaggctagtccgttatcaacttgaaaaagtggcaccgagtcggtgctaacggcagacttctctgcaggagtcaggtgcacca

SEQ ID NO: 21141 - DNA, 131 bp, synthetic construct
  source 1..131: mol_type = other DNA
catggtgcacctgactcctggttttagagctagaaatagcaagttaaaataaggctagtccgttatcaacttgaaaaagtggcaccgagtcggtgctaacggcagacttctctgcaggagtcaggtgcacc

SEQ ID NO: 21142 - DNA, 130 bp, synthetic construct
  source 1..130: mol_type = other DNA
catggtgcacctgactcctggttttagagctagaaatagcaagttaaaataaggctagtccgttatcaacttgaaaaagtggcaccgagtcggtgctaacggcagacttctctgcaggagtcaggtgcac

SEQ ID NO: 21143 - DNA, 129 bp, synthetic construct
  source 1..129: mol_type = other DNA
catggtgcacctgactcctggttttagagctagaaatagcaagttaaaataaggctagtccgttatcaacttgaaaaagtggcaccgagtcggtgctaacggcagacttctctgcaggagtcaggtgca

SEQ ID NO: 21144 - DNA, 128 bp, synthetic construct
  source 1..128: mol_type = other DNA
catggtgcacctgactcctggttttagagctagaaatagcaagttaaaataaggctagtccgttatcaacttgaaaaagtggcaccgagtcggtgctaacggcagacttctctgcaggagtcaggtgc

SEQ ID NO: 21145 - DNA, 127 bp, synthetic construct
  source 1..127: mol_type = other DNA
catggtgcacctgactcctggttttagagctagaaatagcaagttaaaataaggctagtccgttatcaacttgaaaaagtggcaccgagtcggtgctaacggcagacttctctgcaggagtcaggtg

SEQ ID NO: 21146 - DNA, 126 bp, synthetic construct
  source 1..126: mol_type = other DNA
catggtgcacctgactcctggttttagagctagaaatagcaagttaaaataaggctagtccgttatcaacttgaaaaagtggcaccgagtcggtgctaacggcagacttctctgcaggagtcaggt

SEQ ID NO: 21147 - DNA, 125 bp, synthetic construct
  source 1..125: mol_type = other DNA
catggtgcacctgactcctggttttagagctagaaatagcaagttaaaataaggctagtccgttatcaacttgaaaaagtggcaccgagtcggtgctaacggcagacttctctgcaggagtcagg

SEQ ID NO: 21148 - DNA, 133 bp, synthetic construct
  source 1..133: mol_type = other DNA
catggtgcacctgactcctggttttagagctagaaatagcaagttaaaataaggctagtccgttatcaacttgaaaaagtggcaccgagtcggtgcaacggcagacttctctgcaggagtcaggtgcaccatg

SEQ ID NO: 21149 - DNA, 132 bp, synthetic construct
  source 1..132: mol_type = other DNA
catggtgcacctgactcctggttttagagctagaaatagcaagttaaaataaggctagtccgttatcaacttgaaaaagtggcaccgagtcggtgcaacggcagacttctctgcaggagtcaggtgcaccat

SEQ ID NO: 21150 - DNA, 131 bp, synthetic construct
  source 1..131: mol_type = other DNA
catggtgcacctgactcctggttttagagctagaaatagcaagttaaaataaggctagtccgttatcaacttgaaaaagtggcaccgagtcggtgcaacggcagacttctctgcaggagtcaggtgcacca

SEQ ID NO: 21151 - DNA, 130 bp, synthetic construct
  source 1..130: mol_type = other DNA
catggtgcacctgactcctggttttagagctagaaatagcaagttaaaataaggctagtccgttatcaacttgaaaaagtggcaccgagtcggtgcaacggcagacttctctgcaggagtcaggtgcacc

SEQ ID NO: 21152 - DNA, 129 bp, synthetic construct
  source 1..129: mol_type = other DNA
catggtgcacctgactcctggttttagagctagaaatagcaagttaaaataaggctagtccgttatcaacttgaaaaagtggcaccgagtcggtgcaacggcagacttctctgcaggagtcaggtgcac

SEQ ID NO: 21153 - DNA, 128 bp, synthetic construct
  source 1..128: mol_type = other DNA
catggtgcacctgactcctggttttagagctagaaatagcaagttaaaataaggctagtccgttatcaacttgaaaaagtggcaccgagtcggtgcaacggcagacttctctgcaggagtcaggtgca

SEQ ID NO: 21154 - DNA, 127 bp, synthetic construct
  source 1..127: mol_type = other DNA
catggtgcacctgactcctggttttagagctagaaatagcaagttaaaataaggctagtccgttatcaacttgaaaaagtggcaccgagtcggtgcaacggcagacttctctgcaggagtcaggtgc

SEQ ID NO: 21155 - DNA, 126 bp, synthetic construct
  source 1..126: mol_type = other DNA
catggtgcacctgactcctggttttagagctagaaatagcaagttaaaataaggctagtccgttatcaacttgaaaaagtggcaccgagtcggtgcaacggcagacttctctgcaggagtcaggtg

SEQ ID NO: 21156 - DNA, 125 bp, synthetic construct
  source 1..125: mol_type = other DNA
catggtgcacctgactcctggttttagagctagaaatagcaagttaaaataaggctagtccgttatcaacttgaaaaagtggcaccgagtcggtgcaacggcagacttctctgcaggagtcaggt

SEQ ID NO: 21157 - DNA, 124 bp, synthetic construct
  source 1..124: mol_type = other DNA
catggtgcacctgactcctggttttagagctagaaatagcaagttaaaataaggctagtccgttatcaacttgaaaaagtggcaccgagtcggtgcaacggcagacttctctgcaggagtcagg

SEQ ID NO: 21158 - DNA, 132 bp, synthetic construct
  source 1..132: mol_type = other DNA
catggtgcacctgactcctggttttagagctagaaatagcaagttaaaataaggctagtccgttatcaacttgaaaaagtggcaccgagtcggtgcacggcagacttctctgcaggagtcaggtgcaccatg

SEQ ID NO: 21159 - DNA, 131 bp, synthetic construct
  source 1..131: mol_type = other DNA
catggtgcacctgactcctggttttagagctagaaatagcaagttaaaataaggctagtccgttatcaacttgaaaaagtggcaccgagtcggtgcacggcagacttctctgcaggagtcaggtgcaccat

SEQ ID NO: 21160 - DNA, 130 bp, synthetic construct
  source 1..130: mol_type = other DNA
catggtgcacctgactcctggttttagagctagaaatagcaagttaaaataaggctagtccgttatcaacttgaaaaagtggcaccgagtcggtgcacggcagacttctctgcaggagtcaggtgcacca

SEQ ID NO: 21161 - DNA, 129 bp, synthetic construct
  source 1..129: mol_type = other DNA
catggtgcacctgactcctggttttagagctagaaatagcaagttaaaataaggctagtccgttatcaacttgaaaaagtggcaccgagtcggtgcacggcagacttctctgcaggagtcaggtgcacc

SEQ ID NO: 21162 - DNA, 128 bp, synthetic construct
  source 1..128: mol_type = other DNA
catggtgcacctgactcctggttttagagctagaaatagcaagttaaaataaggctagtccgttatcaacttgaaaaagtggcaccgagtcggtgcacggcagacttctctgcaggagtcaggtgcac

SEQ ID NO: 21163 - DNA, 127 bp, synthetic construct
  source 1..127: mol_type = other DNA
catggtgcacctgactcctggttttagagctagaaatagcaagttaaaataaggctagtccgttatcaacttgaaaaagtggcaccgagtcggtgcacggcagacttctctgcaggagtcaggtgca

SEQ ID NO: 21164 - DNA, 126 bp, synthetic construct
  source 1..126: mol_type = other DNA
catggtgcacctgactcctggttttagagctagaaatagcaagttaaaataaggctagtccgttatcaacttgaaaaagtggcaccgagtcggtgcacggcagacttctctgcaggagtcaggtgc

SEQ ID NO: 21165 - DNA, 125 bp, synthetic construct
  source 1..125: mol_type = other DNA
catggtgcacctgactcctggttttagagctagaaatagcaagttaaaataaggctagtccgttatcaacttgaaaaagtggcaccgagtcggtgcacggcagacttctctgcaggagtcaggtg

SEQ ID NO: 21166 - DNA, 124 bp, synthetic construct
  source 1..124: mol_type = other DNA
catggtgcacctgactcctggttttagagctagaaatagcaagttaaaataaggctagtccgttatcaacttgaaaaagtggcaccgagtcggtgcacggcagacttctctgcaggagtcaggt

SEQ ID NO: 21167 - DNA, 123 bp, synthetic construct
  source 1..123: mol_type = other DNA
catggtgcacctgactcctggttttagagctagaaatagcaagttaaaataaggctagtccgttatcaacttgaaaaagtggcaccgagtcggtgcacggcagacttctctgcaggagtcagg

SEQ ID NO: 21168 - DNA, 131 bp, synthetic construct
  source 1..131: mol_type = other DNA
catggtgcacctgactcctggttttagagctagaaatagcaagttaaaataaggctagtccgttatcaacttgaaaaagtggcaccgagtcggtgccggcagacttctctgcaggagtcaggtgcaccatg

SEQ ID NO: 21169 - DNA, 130 bp, synthetic construct
  source 1..130: mol_type = other DNA
catggtgcacctgactcctggttttagagctagaaatagcaagttaaaataaggctagtccgttatcaacttgaaaaagtggcaccgagtcggtgccggcagacttctctgcaggagtcaggtgcaccat

SEQ ID NO: 21170 - DNA, 129 bp, synthetic construct
  source 1..129: mol_type = other DNA
catggtgcacctgactcctggttttagagctagaaatagcaagttaaaataaggctagtccgttatcaacttgaaaaagtggcaccgagtcggtgccggcagacttctctgcaggagtcaggtgcacca

SEQ ID NO: 21171 - DNA, 128 bp, synthetic construct
  source 1..128: mol_type = other DNA
catggtgcacctgactcctggttttagagctagaaatagcaagttaaaataaggctagtccgttatcaacttgaaaaagtggcaccgagtcggtgccggcagacttctctgcaggagtcaggtgcacc

SEQ ID NO: 21172 - DNA, 127 bp, synthetic construct
  source 1..127: mol_type = other DNA
catggtgcacctgactcctggttttagagctagaaatagcaagttaaaataaggctagtccgttatcaacttgaaaaagtggcaccgagtcggtgccggcagacttctctgcaggagtcaggtgcac

SEQ ID NO: 21173 - DNA, 126 bp, synthetic construct
  source 1..126: mol_type = other DNA
catggtgcacctgactcctggttttagagctagaaatagcaagttaaaataaggctagtccgttatcaacttgaaaaagtggcaccgagtcggtgccggcagacttctctgcaggagtcaggtgca

SEQ ID NO: 21174 - DNA, 125 bp, synthetic construct
  source 1..125: mol_type = other DNA
catggtgcacctgactcctggttttagagctagaaatagcaagttaaaataaggctagtccgttatcaacttgaaaaagtggcaccgagtcggtgccggcagacttctctgcaggagtcaggtgc

SEQ ID NO: 21175 - DNA, 124 bp, synthetic construct
  source 1..124: mol_type = other DNA
catggtgcacctgactcctggttttagagctagaaatagcaagttaaaataaggctagtccgttatcaacttgaaaaagtggcaccgagtcggtgccggcagacttctctgcaggagtcaggtg

SEQ ID NO: 21176 - DNA, 123 bp, synthetic construct
  source 1..123: mol_type = other DNA
catggtgcacctgactcctggttttagagctagaaatagcaagttaaaataaggctagtccgttatcaacttgaaaaagtggcaccgagtcggtgccggcagacttctctgcaggagtcaggt

SEQ ID NO: 21177 - DNA, 122 bp, synthetic construct
  source 1..122: mol_type = other DNA
catggtgcacctgactcctggttttagagctagaaatagcaagttaaaataaggctagtccgttatcaacttgaaaaagtggcaccgagtcggtgccggcagacttctctgcaggagtcagg

SEQ ID NO: 21178 - DNA, 130 bp, synthetic construct
  source 1..130: mol_type = other DNA
catggtgcacctgactcctggttttagagctagaaatagcaagttaaaataaggctagtccgttatcaacttgaaaaagtggcaccgagtcggtgcggcagacttctctgcaggagtcaggtgcaccatg

SEQ ID NO: 21179 - DNA, 129 bp, synthetic construct
  source 1..129: mol_type = other DNA
catggtgcacctgactcctggttttagagctagaaatagcaagttaaaataaggctagtccgttatcaacttgaaaaagtggcaccgagtcggtgcggcagacttctctgcaggagtcaggtgcaccat

SEQ ID NO: 21180 - DNA, 128 bp, synthetic construct
  source 1..128: mol_type = other DNA
catggtgcacctgactcctggttttagagctagaaatagcaagttaaaataaggctagtccgttatcaacttgaaaaagtggcaccgagtcggtgcggcagacttctctgcaggagtcaggtgcacca

SEQ ID NO: 21181 - DNA, 127 bp, synthetic construct
  source 1..127: mol_type = other DNA
catggtgcacctgactcctggttttagagctagaaatagcaagttaaaataaggctagtccgttatcaacttgaaaaagtggcaccgagtcggtgcggcagacttctctgcaggagtcaggtgcacc

SEQ ID NO: 21182 - DNA, 126 bp, synthetic construct
  source 1..126: mol_type = other DNA
catggtgcacctgactcctggttttagagctagaaatagcaagttaaaataaggctagtccgttatcaacttgaaaaagtggcaccgagtcggtgcggcagacttctctgcaggagtcaggtgcac

SEQ ID NO: 21183 - DNA, 125 bp, synthetic construct
  source 1..125: mol_type = other DNA
catggtgcacctgactcctggttttagagctagaaatagcaagttaaaataaggctagtccgttatcaacttgaaaaagtggcaccgagtcggtgcggcagacttctctgcaggagtcaggtgca

SEQ ID NO: 21184 - DNA, 124 bp, synthetic construct
  source 1..124: mol_type = other DNA
catggtgcacctgactcctggttttagagctagaaatagcaagttaaaataaggctagtccgttatcaacttgaaaaagtggcaccgagtcggtgcggcagacttctctgcaggagtcaggtgc

SEQ ID NO: 21185 - DNA, 123 bp, synthetic construct
  source 1..123: mol_type = other DNA
catggtgcacctgactcctggttttagagctagaaatagcaagttaaaataaggctagtccgttatcaacttgaaaaagtggcaccgagtcggtgcggcagacttctctgcaggagtcaggtg

SEQ ID NO: 21186 - DNA, 122 bp, synthetic construct
  source 1..122: mol_type = other DNA
catggtgcacctgactcctggttttagagctagaaatagcaagttaaaataaggctagtccgttatcaacttgaaaaagtggcaccgagtcggtgcggcagacttctctgcaggagtcaggt

SEQ ID NO: 21187 - DNA, 121 bp, synthetic construct
  source 1..121: mol_type = other DNA
catggtgcacctgactcctggttttagagctagaaatagcaagttaaaataaggctagtccgttatcaacttgaaaaagtggcaccgagtcggtgcggcagacttctctgcaggagtcagg

SEQ ID NO: 21188 - DNA, 129 bp, synthetic construct
  source 1..129: mol_type = other DNA
catggtgcacctgactcctggttttagagctagaaatagcaagttaaaataaggctagtccgttatcaacttgaaaaagtggcaccgagtcggtgcgcagacttctctgcaggagtcaggtgcaccatg

SEQ ID NO: 21189 - DNA, 128 bp, synthetic construct
  source 1..128: mol_type = other DNA
catggtgcacctgactcctggttttagagctagaaatagcaagttaaaataaggctagtccgttatcaacttgaaaaagtggcaccgagtcggtgcgcagacttctctgcaggagtcaggtgcaccat

SEQ ID NO: 21190 - DNA, 127 bp, synthetic construct
  source 1..127: mol_type = other DNA
catggtgcacctgactcctggttttagagctagaaatagcaagttaaaataaggctagtccgttatcaacttgaaaaagtggcaccgagtcggtgcgcagacttctctgcaggagtcaggtgcacca

SEQ ID NO: 21191 - DNA, 126 bp, synthetic construct
  source 1..126: mol_type = other DNA
catggtgcacctgactcctggttttagagctagaaatagcaagttaaaataaggctagtccgttatcaacttgaaaaagtggcaccgagtcggtgcgcagacttctctgcaggagtcaggtgcacc

SEQ ID NO: 21192 - DNA, 125 bp, synthetic construct
  source 1..125: mol_type = other DNA
catggtgcacctgactcctggttttagagctagaaatagcaagttaaaataaggctagtccgttatcaacttgaaaaagtggcaccgagtcggtgcgcagacttctctgcaggagtcaggtgcac

SEQ ID NO: 21193 - DNA, 124 bp, synthetic construct
  source 1..124: mol_type = other DNA
catggtgcacctgactcctggttttagagctagaaatagcaagttaaaataaggctagtccgttatcaacttgaaaaagtggcaccgagtcggtgcgcagacttctctgcaggagtcaggtgca

SEQ ID NO: 21194 - DNA, 123 bp, synthetic construct
  source 1..123: mol_type = other DNA
catggtgcacctgactcctggttttagagctagaaatagcaagttaaaataaggctagtccgttatcaacttgaaaaagtggcaccgagtcggtgcgcagacttctctgcaggagtcaggtgc

SEQ ID NO: 21195 - DNA, 122 bp, synthetic construct
  source 1..122: mol_type = other DNA
catggtgcacctgactcctggttttagagctagaaatagcaagttaaaataaggctagtccgttatcaacttgaaaaagtggcaccgagtcggtgcgcagacttctctgcaggagtcaggtg

SEQ ID NO: 21196 - DNA, 121 bp, synthetic construct
  source 1..121: mol_type = other DNA
catggtgcacctgactcctggttttagagctagaaatagcaagttaaaataaggctagtccgttatcaacttgaaaaagtggcaccgagtcggtgcgcagacttctctgcaggagtcaggt

SEQ ID NO: 21197 - DNA, 120 bp, synthetic construct
  source 1..120: mol_type = other DNA
catggtgcacctgactcctggttttagagctagaaatagcaagttaaaataaggctagtccgttatcaacttgaaaaagtggcaccgagtcggtgcgcagacttctctgcaggagtcagg

SEQ ID NO: 21198 - DNA, 128 bp, synthetic construct
  source 1..128: mol_type = other DNA
catggtgcacctgactcctggttttagagctagaaatagcaagttaaaataaggctagtccgttatcaacttgaaaaagtggcaccgagtcggtgccagacttctctgcaggagtcaggtgcaccatg

SEQ ID NO: 21199 - DNA, 127 bp, synthetic construct
  source 1..127: mol_type = other DNA
catggtgcacctgactcctggttttagagctagaaatagcaagttaaaataaggctagtccgttatcaacttgaaaaagtggcaccgagtcggtgccagacttctctgcaggagtcaggtgcaccat

SEQ ID NO: 21200 - DNA, 126 bp, synthetic construct
  source 1..126: mol_type = other DNA
catggtgcacctgactcctggttttagagctagaaatagcaagttaaaataaggctagtccgttatcaacttgaaaaagtggcaccgagtcggtgccagacttctctgcaggagtcaggtgcacca

SEQ ID NO: 21201 - DNA, 125 bp, synthetic construct
  source 1..125: mol_type = other DNA
catggtgcacctgactcctggttttagagctagaaatagcaagttaaaataaggctagtccgttatcaacttgaaaaagtggcaccgagtcggtgccagacttctctgcaggagtcaggtgcacc

SEQ ID NO: 21202 - DNA, 124 bp, synthetic construct
  source 1..124: mol_type = other DNA
catggtgcacctgactcctggttttagagctagaaatagcaagttaaaataaggctagtccgttatcaacttgaaaaagtggcaccgagtcggtgccagacttctctgcaggagtcaggtgcac

SEQ ID NO: 21203 - DNA, 123 bp, synthetic construct
  source 1..123: mol_type = other DNA
catggtgcacctgactcctggttttagagctagaaatagcaagttaaaataaggctagtccgttatcaacttgaaaaagtggcaccgagtcggtgccagacttctctgcaggagtcaggtgca

SEQ ID NO: 21204 - DNA, 122 bp, synthetic construct
  source 1..122: mol_type = other DNA
catggtgcacctgactcctggttttagagctagaaatagcaagttaaaataaggctagtccgttatcaacttgaaaaagtggcaccgagtcggtgccagacttctctgcaggagtcaggtgc

SEQ ID NO: 21205 - DNA, 121 bp, synthetic construct
  source 1..121: mol_type = other DNA
catggtgcacctgactcctggttttagagctagaaatagcaagttaaaataaggctagtccgttatcaacttgaaaaagtggcaccgagtcggtgccagacttctctgcaggagtcaggtg

SEQ ID NO: 21206 - DNA, 120 bp, synthetic construct
  source 1..120: mol_type = other DNA
catggtgcacctgactcctggttttagagctagaaatagcaagttaaaataaggctagtccgttatcaacttgaaaaagtggcaccgagtcggtgccagacttctctgcaggagtcaggt

SEQ ID NO: 21207 - DNA, 119 bp, synthetic construct
  source 1..119: mol_type = other DNA
catggtgcacctgactcctggttttagagctagaaatagcaagttaaaataaggctagtccgttatcaacttgaaaaagtggcaccgagtcggtgccagacttctctgcaggagtcagg

SEQ ID NO: 21208 - DNA, 127 bp, synthetic construct
  source 1..127: mol_type = other DNA
catggtgcacctgactcctggttttagagctagaaatagcaagttaaaataaggctagtccgttatcaacttgaaaaagtggcaccgagtcggtgcagacttctctgcaggagtcaggtgcaccatg

SEQ ID NO: 21209 - DNA, 126 bp, synthetic construct
  source 1..126: mol_type = other DNA
catggtgcacctgactcctggttttagagctagaaatagcaagttaaaataaggctagtccgttatcaacttgaaaaagtggcaccgagtcggtgcagacttctctgcaggagtcaggtgcaccat

SEQ ID NO: 21210 - DNA, 125 bp, synthetic construct
  source 1..125: mol_type = other DNA
catggtgcacctgactcctggttttagagctagaaatagcaagttaaaataaggctagtccgttatcaacttgaaaaagtggcaccgagtcggtgcagacttctctgcaggagtcaggtgcacca

SEQ ID NO: 21211 - DNA, 124 bp, synthetic construct
  source 1..124: mol_type = other DNA
catggtgcacctgactcctggttttagagctagaaatagcaagttaaaataaggctagtccgttatcaacttgaaaaagtggcaccgagtcggtgcagacttctctgcaggagtcaggtgcacc

SEQ ID NO: 21212 - DNA, 123 bp, synthetic construct
  source 1..123: mol_type = other DNA
catggtgcacctgactcctggttttagagctagaaatagcaagttaaaataaggctagtccgttatcaacttgaaaaagtggcaccgagtcggtgcagacttctctgcaggagtcaggtgcac

SEQ ID NO: 21213 - DNA, 122 bp, synthetic construct
  source 1..122: mol_type = other DNA
catggtgcacctgactcctggttttagagctagaaatagcaagttaaaataaggctagtccgttatcaacttgaaaaagtggcaccgagtcggtgcagacttctctgcaggagtcaggtgca

SEQ ID NO: 21214 - DNA, 121 bp, synthetic construct
  source 1..121: mol_type = other DNA
catggtgcacctgactcctggttttagagctagaaatagcaagttaaaataaggctagtccgttatcaacttgaaaaagtggcaccgagtcggtgcagacttctctgcaggagtcaggtgc

SEQ ID NO: 21215 - DNA, 120 bp, synthetic construct
  source 1..120: mol_type = other DNA
catggtgcacctgactcctggttttagagctagaaatagcaagttaaaataaggctagtccgttatcaacttgaaaaagtggcaccgagtcggtgcagacttctctgcaggagtcaggtg

SEQ ID NO: 21216 - DNA, 119 bp, synthetic construct
  source 1..119: mol_type = other DNA
catggtgcacctgactcctggttttagagctagaaatagcaagttaaaataaggctagtccgttatcaacttgaaaaagtggcaccgagtcggtgcagacttctctgcaggagtcaggt

SEQ ID NO: 21217 - DNA, 118 bp, synthetic construct
  source 1..118: mol_type = other DNA
catggtgcacctgactcctggttttagagctagaaatagcaagttaaaataaggctagtccgttatcaacttgaaaaagtggcaccgagtcggtgcagacttctctgcaggagtcagg

SEQ ID NO: 21218 - DNA, 126 bp, synthetic construct
  source 1..126: mol_type = other DNA
catggtgcacctgactcctggttttagagctagaaatagcaagttaaaataaggctagtccgttatcaacttgaaaaagtggcaccgagtcggtgcgacttctctgcaggagtcaggtgcaccatg

SEQ ID NO: 21219 - DNA, 125 bp, synthetic construct
  source 1..125: mol_type = other DNA
catggtgcacctgactcctggttttagagctagaaatagcaagttaaaataaggctagtccgttatcaacttgaaaaagtggcaccgagtcggtgcgacttctctgcaggagtcaggtgcaccat

SEQ ID NO: 21220 - DNA, 124 bp, synthetic construct
  source 1..124: mol_type = other DNA
catggtgcacctgactcctggttttagagctagaaatagcaagttaaaataaggctagtccgttatcaacttgaaaaagtggcaccgagtcggtgcgacttctctgcaggagtcaggtgcacca

SEQ ID NO: 21221 - DNA, 123 bp, synthetic construct
  source 1..123: mol_type = other DNA
catggtgcacctgactcctggttttagagctagaaatagcaagttaaaataaggctagtccgttatcaacttgaaaaagtggcaccgagtcggtgcgacttctctgcaggagtcaggtgcacc

SEQ ID NO: 21222 - DNA, 122 bp, synthetic construct
  source 1..122: mol_type = other DNA
catggtgcacctgactcctggttttagagctagaaatagcaagttaaaataaggctagtccgttatcaacttgaaaaagtggcaccgagtcggtgcgacttctctgcaggagtcaggtgcac

SEQ ID NO: 21223 - DNA, 121 bp, synthetic construct
  source 1..121: mol_type = other DNA
catggtgcacctgactcctggttttagagctagaaatagcaagttaaaataaggctagtccgttatcaacttgaaaaagtggcaccgagtcggtgcgacttctctgcaggagtcaggtgca

SEQ ID NO: 21224 - DNA, 120 bp, synthetic construct
  source 1..120: mol_type = other DNA
catggtgcacctgactcctggttttagagctagaaatagcaagttaaaataaggctagtccgttatcaacttgaaaaagtggcaccgagtcggtgcgacttctctgcaggagtcaggtgc

SEQ ID NO: 21225 - DNA, 119 bp, synthetic construct
  source 1..119: mol_type = other DNA
catggtgcacctgactcctggttttagagctagaaatagcaagttaaaataaggctagtccgttatcaacttgaaaaagtggcaccgagtcggtgcgacttctctgcaggagtcaggtg

SEQ ID NO: 21226 - DNA, 118 bp, synthetic construct
  source 1..118: mol_type = other DNA
catggtgcacctgactcctggttttagagctagaaatagcaagttaaaataaggctagtccgttatcaacttgaaaaagtggcaccgagtcggtgcgacttctctgcaggagtcaggt

SEQ ID NO: 21227 - DNA, 117 bp, synthetic construct
  source 1..117: mol_type = other DNA
catggtgcacctgactcctggttttagagctagaaatagcaagttaaaataaggctagtccgttatcaacttgaaaaagtggcaccgagtcggtgcgacttctctgcaggagtcagg

SEQ ID NO: 21228 - DNA, 125 bp, synthetic construct
  source 1..125: mol_type = other DNA
catggtgcacctgactcctggttttagagctagaaatagcaagttaaaataaggctagtccgttatcaacttgaaaaagtggcaccgagtcggtgcacttctctgcaggagtcaggtgcaccatg

SEQ ID NO: 21229 - DNA, 124 bp, synthetic construct
  source 1..124: mol_type = other DNA
catggtgcacctgactcctggttttagagctagaaatagcaagttaaaataaggctagtccgttatcaacttgaaaaagtggcaccgagtcggtgcacttctctgcaggagtcaggtgcaccat

SEQ ID NO: 21230 - DNA, 123 bp, synthetic construct
  source 1..123: mol_type = other DNA
catggtgcacctgactcctggttttagagctagaaatagcaagttaaaataaggctagtccgttatcaacttgaaaaagtggcaccgagtcggtgcacttctctgcaggagtcaggtgcacca

SEQ ID NO: 21231 - DNA, 122 bp, synthetic construct
  source 1..122: mol_type = other DNA
catggtgcacctgactcctggttttagagctagaaatagcaagttaaaataaggctagtccgttatcaacttgaaaaagtggcaccgagtcggtgcacttctctgcaggagtcaggtgcacc

SEQ ID NO: 21232 - DNA, 121 bp, synthetic construct
  source 1..121: mol_type = other DNA
catggtgcacctgactcctggttttagagctagaaatagcaagttaaaataaggctagtccgttatcaacttgaaaaagtggcaccgagtcggtgcacttctctgcaggagtcaggtgcac

SEQ ID NO: 21233 - DNA, 120 bp, synthetic construct
  source 1..120: mol_type = other DNA
catggtgcacctgactcctggttttagagctagaaatagcaagttaaaataaggctagtccgttatcaacttgaaaaagtggcaccgagtcggtgcacttctctgcaggagtcaggtgca

SEQ ID NO: 21234 - DNA, 119 bp, synthetic construct
  source 1..119: mol_type = other DNA
catggtgcacctgactcctggttttagagctagaaatagcaagttaaaataaggctagtccgttatcaacttgaaaaagtggcaccgagtcggtgcacttctctgcaggagtcaggtgc

SEQ ID NO: 21235 - DNA, 118 bp, synthetic construct
  source 1..118: mol_type = other DNA
catggtgcacctgactcctggttttagagctagaaatagcaagttaaaataaggctagtccgttatcaacttgaaaaagtggcaccgagtcggtgcacttctctgcaggagtcaggtg

SEQ ID NO: 21236 - DNA, 117 bp, synthetic construct
  source 1..117: mol_type = other DNA
catggtgcacctgactcctggttttagagctagaaatagcaagttaaaataaggctagtccgttatcaacttgaaaaagtggcaccgagtcggtgcacttctctgcaggagtcaggt

SEQ ID NO: 21237 - DNA, 116 bp, synthetic construct
  source 1..116: mol_type = other DNA
catggtgcacctgactcctggttttagagctagaaatagcaagttaaaataaggctagtccgttatcaacttgaaaaagtggcaccgagtcggtgcacttctctgcaggagtcagg

SEQ ID NO: 21238 - DNA, 124 bp, synthetic construct
  source 1..124: mol_type = other DNA
catggtgcacctgactcctggttttagagctagaaatagcaagttaaaataaggctagtccgttatcaacttgaaaaagtggcaccgagtcggtgccttctctgcaggagtcaggtgcaccatg

SEQ ID NO: 21239 - DNA, 123 bp, synthetic construct
  source 1..123: mol_type = other DNA
catggtgcacctgactcctggttttagagctagaaatagcaagttaaaataaggctagtccgttatcaacttgaaaaagtggcaccgagtcggtgccttctctgcaggagtcaggtgcaccat

SEQ ID NO: 21240 - DNA, 122 bp, synthetic construct
  source 1..122: mol_type = other DNA
catggtgcacctgactcctggttttagagctagaaatagcaagttaaaataaggctagtccgttatcaacttgaaaaagtggcaccgagtcggtgccttctctgcaggagtcaggtgcacca

SEQ ID NO: 21241 - DNA, 121 bp, synthetic construct
  source 1..121: mol_type = other DNA
catggtgcacctgactcctggttttagagctagaaatagcaagttaaaataaggctagtccgttatcaacttgaaaaagtggcaccgagtcggtgccttctctgcaggagtcaggtgcacc

SEQ ID NO: 21242 - DNA, 120 bp, synthetic construct
  source 1..120: mol_type = other DNA
catggtgcacctgactcctggttttagagctagaaatagcaagttaaaataaggctagtccgttatcaacttgaaaaagtggcaccgagtcggtgccttctctgcaggagtcaggtgcac

SEQ ID NO: 21243 - DNA, 119 bp, synthetic construct
  source 1..119: mol_type = other DNA
catggtgcacctgactcctggttttagagctagaaatagcaagttaaaataaggctagtccgttatcaacttgaaaaagtggcaccgagtcggtgccttctctgcaggagtcaggtgca

SEQ ID NO: 21244 - DNA, 118 bp, synthetic construct
  source 1..118: mol_type = other DNA
catggtgcacctgactcctggttttagagctagaaatagcaagttaaaataaggctagtccgttatcaacttgaaaaagtggcaccgagtcggtgccttctctgcaggagtcaggtgc

SEQ ID NO: 21245 - DNA, 117 bp, synthetic construct
  source 1..117: mol_type = other DNA
catggtgcacctgactcctggttttagagctagaaatagcaagttaaaataaggctagtccgttatcaacttgaaaaagtggcaccgagtcggtgccttctctgcaggagtcaggtg

SEQ ID NO: 21246 - DNA, 116 bp, synthetic construct
  source 1..116: mol_type = other DNA
catggtgcacctgactcctggttttagagctagaaatagcaagttaaaataaggctagtccgttatcaacttgaaaaagtggcaccgagtcggtgccttctctgcaggagtcaggt

SEQ ID NO: 21247 - DNA, 115 bp, synthetic construct
  source 1..115: mol_type = other DNA
catggtgcacctgactcctggttttagagctagaaatagcaagttaaaataaggctagtccgttatcaacttgaaaaagtggcaccgagtcggtgccttctctgcaggagtcagg

SEQ ID NO: 21248 - DNA, 123 bp, synthetic construct
  source 1..123: mol_type = other DNA
catggtgcacctgactcctggttttagagctagaaatagcaagttaaaataaggctagtccgttatcaacttgaaaaagtggcaccgagtcggtgcttctctgcaggagtcaggtgcaccatg

SEQ ID NO: 21249 - DNA, 122 bp, synthetic construct
  source 1..122: mol_type = other DNA
catggtgcacctgactcctggttttagagctagaaatagcaagttaaaataaggctagtccgttatcaacttgaaaaagtggcaccgagtcggtgcttctctgcaggagtcaggtgcaccat

SEQ ID NO: 21250 - DNA, 121 bp, synthetic construct
  source 1..121: mol_type = other DNA
catggtgcacctgactcctggttttagagctagaaatagcaagttaaaataaggctagtccgttatcaacttgaaaaagtggcaccgagtcggtgcttctctgcaggagtcaggtgcacca

SEQ ID NO: 21251 - DNA, 120 bp, synthetic construct
  source 1..120: mol_type = other DNA
catggtgcacctgactcctggttttagagctagaaatagcaagttaaaataaggctagtccgttatcaacttgaaaaagtggcaccgagtcggtgcttctctgcaggagtcaggtgcacc

SEQ ID NO: 21252 - DNA, 119 bp, synthetic construct
  source 1..119: mol_type = other DNA
catggtgcacctgactcctggttttagagctagaaatagcaagttaaaataaggctagtccgttatcaacttgaaaaagtggcaccgagtcggtgcttctctgcaggagtcaggtgcac

SEQ ID NO: 21253 - DNA, 118 bp, synthetic construct
  source 1..118: mol_type = other DNA
catggtgcacctgactcctggttttagagctagaaatagcaagttaaaataaggctagtccgttatcaacttgaaaaagtggcaccgagtcggtgcttctctgcaggagtcaggtgca

SEQ ID NO: 21254 - DNA, 117 bp, synthetic construct
  source 1..117: mol_type = other DNA
catggtgcacctgactcctggttttagagctagaaatagcaagttaaaataaggctagtccgttatcaacttgaaaaagtggcaccgagtcggtgcttctctgcaggagtcaggtgc

SEQ ID NO: 21255 - DNA, 116 bp, synthetic construct
  source 1..116: mol_type = other DNA
catggtgcacctgactcctggttttagagctagaaatagcaagttaaaataaggctagtccgttatcaacttgaaaaagtggcaccgagtcggtgcttctctgcaggagtcaggtg

SEQ ID NO: 21256 - DNA, 115 bp, synthetic construct
  source 1..115: mol_type = other DNA
catggtgcacctgactcctggttttagagctagaaatagcaagttaaaataaggctagtccgttatcaacttgaaaaagtggcaccgagtcggtgcttctctgcaggagtcaggt

SEQ ID NO: 21257 - DNA, 114 bp, synthetic construct
  source 1..114: mol_type = other DNA
catggtgcacctgactcctggttttagagctagaaatagcaagttaaaataaggctagtccgttatcaacttgaaaaagtggcaccgagtcggtgcttctctgcaggagtcagg

SEQ ID NO: 21258 - DNA, 122 bp, synthetic construct
  source 1..122: mol_type = other DNA
catggtgcacctgactcctggttttagagctagaaatagcaagttaaaataaggctagtccgttatcaacttgaaaaagtggcaccgagtcggtgctctctgcaggagtcaggtgcaccatg

SEQ ID NO: 21259 - DNA, 121 bp, synthetic construct
  source 1..121: mol_type = other DNA
catggtgcacctgactcctggttttagagctagaaatagcaagttaaaataaggctagtccgttatcaacttgaaaaagtggcaccgagtcggtgctctctgcaggagtcaggtgcaccat

SEQ ID NO: 21260 - DNA, 120 bp, synthetic construct
  source 1..120: mol_type = other DNA
catggtgcacctgactcctggttttagagctagaaatagcaagttaaaataaggctagtccgttatcaacttgaaaaagtggcaccgagtcggtgctctctgcaggagtcaggtgcacca

SEQ ID NO: 21261 - DNA, 119 bp, synthetic construct
  source 1..119: mol_type = other DNA
catggtgcacctgactcctggttttagagctagaaatagcaagttaaaataaggctagtccgttatcaacttgaaaaagtggcaccgagtcggtgctctctgcaggagtcaggtgcacc

SEQ ID NO: 21262 - DNA, 118 bp, synthetic construct
  source 1..118: mol_type = other DNA
catggtgcacctgactcctggttttagagctagaaatagcaagttaaaataaggctagtccgttatcaacttgaaaaagtggcaccgagtcggtgctctctgcaggagtcaggtgcac

SEQ ID NO: 21263 - DNA, 117 bp, synthetic construct
  source 1..117: mol_type = other DNA
catggtgcacctgactcctggttttagagctagaaatagcaagttaaaataaggctagtccgttatcaacttgaaaaagtggcaccgagtcggtgctctctgcaggagtcaggtgca

SEQ ID NO: 21264 - DNA, 116 bp, synthetic construct
  source 1..116: mol_type = other DNA
catggtgcacctgactcctggttttagagctagaaatagcaagttaaaataaggctagtccgttatcaacttgaaaaagtggcaccgagtcggtgctctctgcaggagtcaggtgc

SEQ ID NO: 21265 - DNA, 115 bp, synthetic construct
  source 1..115: mol_type = other DNA
catggtgcacctgactcctggttttagagctagaaatagcaagttaaaataaggctagtccgttatcaacttgaaaaagtggcaccgagtcggtgctctctgcaggagtcaggtg

SEQ ID NO: 21266 - DNA, 114 bp, synthetic construct
  source 1..114: mol_type = other DNA
catggtgcacctgactcctggttttagagctagaaatagcaagttaaaataaggctagtccgttatcaacttgaaaaagtggcaccgagtcggtgctctctgcaggagtcaggt

SEQ ID NO: 21267 - DNA, 113 bp, synthetic construct
  source 1..113: mol_type = other DNA
catggtgcacctgactcctggttttagagctagaaatagcaagttaaaataaggctagtccgttatcaacttgaaaaagtggcaccgagtcggtgctctctgcaggagtcagg

SEQ ID NO: 21268 - DNA, 121 bp, synthetic construct
  source 1..121: mol_type = other DNA
catggtgcacctgactcctggttttagagctagaaatagcaagttaaaataaggctagtccgttatcaacttgaaaaagtggcaccgagtcggtgcctctgcaggagtcaggtgcaccatg

SEQ ID NO: 21269 - DNA, 120 bp, synthetic construct
  source 1..120: mol_type = other DNA
catggtgcacctgactcctggttttagagctagaaatagcaagttaaaataaggctagtccgttatcaacttgaaaaagtggcaccgagtcggtgcctctgcaggagtcaggtgcaccat

SEQ ID NO: 21270 - DNA, 119 bp, synthetic construct
  source 1..119: mol_type = other DNA
catggtgcacctgactcctggttttagagctagaaatagcaagttaaaataaggctagtccgttatcaacttgaaaaagtggcaccgagtcggtgcctctgcaggagtcaggtgcacca

SEQ ID NO: 21271 - DNA, 118 bp, synthetic construct
  source 1..118: mol_type = other DNA
catggtgcacctgactcctggttttagagctagaaatagcaagttaaaataaggctagtccgttatcaacttgaaaaagtggcaccgagtcggtgcctctgcaggagtcaggtgcacc

SEQ ID NO: 21272 - DNA, 117 bp, synthetic construct
  source 1..117: mol_type = other DNA
catggtgcacctgactcctggttttagagctagaaatagcaagttaaaataaggctagtccgttatcaacttgaaaaagtggcaccgagtcggtgcctctgcaggagtcaggtgcac

SEQ ID NO: 21273 - DNA, 116 bp, synthetic construct
  source 1..116: mol_type = other DNA
catggtgcacctgactcctggttttagagctagaaatagcaagttaaaataaggctagtccgttatcaacttgaaaaagtggcaccgagtcggtgcctctgcaggagtcaggtgca

SEQ ID NO: 21274 - DNA, 115 bp, synthetic construct
  source 1..115: mol_type = other DNA
catggtgcacctgactcctggttttagagctagaaatagcaagttaaaataaggctagtccgttatcaacttgaaaaagtggcaccgagtcggtgcctctgcaggagtcaggtgc

SEQ ID NO: 21275 - DNA, 114 bp, synthetic construct
  source 1..114: mol_type = other DNA
catggtgcacctgactcctggttttagagctagaaatagcaagttaaaataaggctagtccgttatcaacttgaaaaagtggcaccgagtcggtgcctctgcaggagtcaggtg

SEQ ID NO: 21276 - DNA, 113 bp, synthetic construct
  source 1..113: mol_type = other DNA
catggtgcacctgactcctggttttagagctagaaatagcaagttaaaataaggctagtccgttatcaacttgaaaaagtggcaccgagtcggtgcctctgcaggagtcaggt

SEQ ID NO: 21277 - DNA, 112 bp, synthetic construct
  source 1..112: mol_type = other DNA
catggtgcacctgactcctggttttagagctagaaatagcaagttaaaataaggctagtccgttatcaacttgaaaaagtggcaccgagtcggtgcctctgcaggagtcagg

SEQ ID NO: 21278 - DNA, 136 bp, synthetic construct
  source 1..136: mol_type = other DNA
gtaacggcagacttctccacgttttagagctagaaatagcaagttaaaataaggctagtccgttatcaacttgaaaaagtggcaccgagtcggtgcccatggtgcacctgactcctgaggagaagtctgccgttac

SEQ ID NO: 21279 - DNA, 135 bp, synthetic construct
  source 1..135: mol_type = other DNA
gtaacggcagacttctccacgttttagagctagaaatagcaagttaaaataaggctagtccgttatcaacttgaaaaagtggcaccgagtcggtgcccatggtgcacctgactcctgaggagaagtctgccgtta

SEQ ID NO: 21280 - DNA, 134 bp, synthetic construct
  source 1..134: mol_type = other DNA
gtaacggcagacttctccacgttttagagctagaaatagcaagttaaaataaggctagtccgttatcaacttgaaaaagtggcaccgagtcggtgcccatggtgcacctgactcctgaggagaagtctgccgtt

SEQ ID NO: 21281 - DNA, 133 bp, synthetic construct
  source 1..133: mol_type = other DNA
gtaacggcagacttctccacgttttagagctagaaatagcaagttaaaataaggctagtccgttatcaacttgaaaaagtggcaccgagtcggtgcccatggtgcacctgactcctgaggagaagtctgccgt

SEQ ID NO: 21282 - DNA, 132 bp, synthetic construct
  source 1..132: mol_type = other DNA
gtaacggcagacttctccacgttttagagctagaaatagcaagttaaaataaggctagtccgttatcaacttgaaaaagtggcaccgagtcggtgcccatggtgcacctgactcctgaggagaagtctgccg

SEQ ID NO: 21283 - DNA, 131 bp, synthetic construct
  source 1..131: mol_type = other DNA
gtaacggcagacttctccacgttttagagctagaaatagcaagttaaaataaggctagtccgttatcaacttgaaaaagtggcaccgagtcggtgcccatggtgcacctgactcctgaggagaagtctgcc

SEQ ID NO: 21284 - DNA, 130 bp, synthetic construct
  source 1..130: mol_type = other DNA
gtaacggcagacttctccacgttttagagctagaaatagcaagttaaaataaggctagtccgttatcaacttgaaaaagtggcaccgagtcggtgcccatggtgcacctgactcctgaggagaagtctgc

SEQ ID NO: 21285 - DNA, 129 bp, synthetic construct
  source 1..129: mol_type = other DNA
gtaacggcagacttctccacgttttagagctagaaatagcaagttaaaataaggctagtccgttatcaacttgaaaaagtggcaccgagtcggtgcccatggtgcacctgactcctgaggagaagtctg

SEQ ID NO: 21286 - DNA, 128 bp, synthetic construct
  source 1..128: mol_type = other DNA
gtaacggcagacttctccacgttttagagctagaaatagcaagttaaaataaggctagtccgttatcaacttgaaaaagtggcaccgagtcggtgcccatggtgcacctgactcctgaggagaagtct

SEQ ID NO: 21287 - DNA, 127 bp, synthetic construct
  source 1..127: mol_type = other DNA
gtaacggcagacttctccacgttttagagctagaaatagcaagttaaaataaggctagtccgttatcaacttgaaaaagtggcaccgagtcggtgcccatggtgcacctgactcctgaggagaagtc

SEQ ID NO: 21288 - DNA, 135 bp, synthetic construct
  source 1..135: mol_type = other DNA
gtaacggcagacttctccacgttttagagctagaaatagcaagttaaaataaggctagtccgttatcaacttgaaaaagtggcaccgagtcggtgccatggtgcacctgactcctgaggagaagtctgccgttac

SEQ ID NO: 21289 - DNA, 134 bp, synthetic construct
  source 1..134: mol_type = other DNA
gtaacggcagacttctccacgttttagagctagaaatagcaagttaaaataaggctagtccgttatcaacttgaaaaagtggcaccgagtcggtgccatggtgcacctgactcctgaggagaagtctgccgtta

SEQ ID NO: 21290 - DNA, 133 bp, synthetic construct
  source 1..133: mol_type = other DNA
gtaacggcagacttctccacgttttagagctagaaatagcaagttaaaataaggctagtccgttatcaacttgaaaaagtggcaccgagtcggtgccatggtgcacctgactcctgaggagaagtctgccgtt

SEQ ID NO: 21291 - DNA, 132 bp, synthetic construct
  source 1..132: mol_type = other DNA
gtaacggcagacttctccacgttttagagctagaaatagcaagttaaaataaggctagtccgttatcaacttgaaaaagtggcaccgagtcggtgccatggtgcacctgactcctgaggagaagtctgccgt

SEQ ID NO: 21292 - DNA, 131 bp, synthetic construct
  source 1..131: mol_type = other DNA
gtaacggcagacttctccacgttttagagctagaaatagcaagttaaaataaggctagtccgttatcaacttgaaaaagtggcaccgagtcggtgccatggtgcacctgactcctgaggagaagtctgccg

SEQ ID NO: 21293 - DNA, 130 bp, synthetic construct
  source 1..130: mol_type = other DNA
gtaacggcagacttctccacgttttagagctagaaatagcaagttaaaataaggctagtccgttatcaacttgaaaaagtggcaccgagtcggtgccatggtgcacctgactcctgaggagaagtctgcc

SEQ ID NO: 21294 - DNA, 129 bp, synthetic construct
  source 1..129: mol_type = other DNA
gtaacggcagacttctccacgttttagagctagaaatagcaagttaaaataaggctagtccgttatcaacttgaaaaagtggcaccgagtcggtgccatggtgcacctgactcctgaggagaagtctgc

SEQ ID NO: 21295 - DNA, 128 bp, synthetic construct
  source 1..128: mol_type = other DNA
gtaacggcagacttctccacgttttagagctagaaatagcaagttaaaataaggctagtccgttatcaacttgaaaaagtggcaccgagtcggtgccatggtgcacctgactcctgaggagaagtctg

SEQ ID NO: 21296 - DNA, 127 bp, synthetic construct
  source 1..127: mol_type = other DNA
gtaacggcagacttctccacgttttagagctagaaatagcaagttaaaataaggctagtccgttatcaacttgaaaaagtggcaccgagtcggtgccatggtgcacctgactcctgaggagaagtct

SEQ ID NO: 21297 - DNA, 126 bp, synthetic construct
  source 1..126: mol_type = other DNA
gtaacggcagacttctccacgttttagagctagaaatagcaagttaaaataaggctagtccgttatcaacttgaaaaagtggcaccgagtcggtgccatggtgcacctgactcctgaggagaagtc

SEQ ID NO: 21298 - DNA, 134 bp, synthetic construct
  source 1..134: mol_type = other DNA
gtaacggcagacttctccacgttttagagctagaaatagcaagttaaaataaggctagtccgttatcaacttgaaaaagtggcaccgagtcggtgcatggtgcacctgactcctgaggagaagtctgccgttac

SEQ ID NO: 21299 - DNA, 133 bp, synthetic construct
  source 1..133: mol_type = other DNA
gtaacggcagacttctccacgttttagagctagaaatagcaagttaaaataaggctagtccgttatcaacttgaaaaagtggcaccgagtcggtgcatggtgcacctgactcctgaggagaagtctgccgtta

SEQ ID NO: 21300 - DNA, 132 bp, synthetic construct
  source 1..132: mol_type = other DNA
gtaacggcagacttctccacgttttagagctagaaatagcaagttaaaataaggctagtccgttatcaacttgaaaaagtggcaccgagtcggtgcatggtgcacctgactcctgaggagaagtctgccgtt

SEQ ID NO: 21301 - DNA, 131 bp, synthetic construct
  source 1..131: mol_type = other DNA
gtaacggcagacttctccacgttttagagctagaaatagcaagttaaaataaggctagtccgttatcaacttgaaaaagtggcaccgagtcggtgcatggtgcacctgactcctgaggagaagtctgccgt

SEQ ID NO: 21302 - DNA, 130 bp, synthetic construct
  source 1..130: mol_type = other DNA
gtaacggcagacttctccacgttttagagctagaaatagcaagttaaaataaggctagtccgttatcaacttgaaaaagtggcaccgagtcggtgcatggtgcacctgactcctgaggagaagtctgccg

SEQ ID NO: 21303 - DNA, 129 bp, synthetic construct
  source 1..129: mol_type = other DNA
gtaacggcagacttctccacgttttagagctagaaatagcaagttaaaataaggctagtccgttatcaacttgaaaaagtggcaccgagtcggtgcatggtgcacctgactcctgaggagaagtctgcc

SEQ ID NO: 21304 - DNA, 128 bp, synthetic construct
  source 1..128: mol_type = other DNA
gtaacggcagacttctccacgttttagagctagaaatagcaagttaaaataaggctagtccgttatcaacttgaaaaagtggcaccgagtcggtgcatggtgcacctgactcctgaggagaagtctgc

SEQ ID NO: 21305 - DNA, 127 bp, synthetic construct
  source 1..127: mol_type = other DNA
gtaacggcagacttctccacgttttagagctagaaatagcaagttaaaataaggctagtccgttatcaacttgaaaaagtggcaccgagtcggtgcatggtgcacctgactcctgaggagaagtctg

SEQ ID NO: 21306 - DNA, 126 bp, synthetic construct
  source 1..126: mol_type = other DNA
gtaacggcagacttctccacgttttagagctagaaatagcaagttaaaataaggctagtccgttatcaacttgaaaaagtggcaccgagtcggtgcatggtgcacctgactcctgaggagaagtct

SEQ ID NO: 21307 - DNA, 125 bp, synthetic construct
  source 1..125: mol_type = other DNA
gtaacggcagacttctccacgttttagagctagaaatagcaagttaaaataaggctagtccgttatcaacttgaaaaagtggcaccgagtcggtgcatggtgcacctgactcctgaggagaagtc

SEQ ID NO: 21308 - DNA, 133 bp, synthetic construct; identical to SEQ ID NO: 20331
  source 1..133: mol_type = other DNA

SEQ ID NO: 21309 - DNA, 132 bp, synthetic construct; identical to SEQ ID NO: 20332
  source 1..132: mol_type = other DNA

SEQ ID NO: 21310 - DNA, 131 bp, synthetic construct; identical to SEQ ID NO: 20333
  source 1..131: mol_type = other DNA

SEQ ID NO: 21311 - DNA, 130 bp, synthetic construct; identical to SEQ ID NO: 20334
  source 1..130: mol_type = other DNA

SEQ ID NO: 21312 - DNA, 129 bp, synthetic construct; identical to SEQ ID NO: 20335
  source 1..129: mol_type = other DNA

SEQ ID NO: 21313 - DNA, 128 bp, synthetic construct; identical to SEQ ID NO: 20336
  source 1..128: mol_type = other DNA

SEQ ID NO: 21314 - DNA, 127 bp, synthetic construct; identical to SEQ ID NO: 20337
  source 1..127: mol_type = other DNA

SEQ ID NO: 21315 - DNA, 126 bp, synthetic construct; identical to SEQ ID NO: 20338
  source 1..126: mol_type = other DNA

SEQ ID NO: 21316 - DNA, 125 bp, synthetic construct; identical to SEQ ID NO: 20339
  source 1..125: mol_type = other DNA

SEQ ID NO: 21317 - DNA, 124 bp, synthetic construct; identical to SEQ ID NO: 20340
  source 1..124: mol_type = other DNA

SEQ ID NO: 21318 - DNA, 132 bp, synthetic construct; identical to SEQ ID NO: 20341
  source 1..132: mol_type = other DNA

SEQ ID NO: 21319 - DNA, 131 bp, synthetic construct; identical to SEQ ID NO: 20342
  source 1..131: mol_type = other DNA

SEQ ID NO: 21320 - DNA, 130 bp, synthetic construct; identical to SEQ ID NO: 20343
  source 1..130: mol_type = other DNA

SEQ ID NO: 21321 - DNA, 129 bp, synthetic construct; identical to SEQ ID NO: 20344
  source 1..129: mol_type = other DNA

SEQ ID NO: 21322 - DNA, 128 bp, synthetic construct; identical to SEQ ID NO: 20345
  source 1..128: mol_type = other DNA

SEQ ID NO: 21323 - DNA, 127 bp, synthetic construct; identical to SEQ ID NO: 20346
  source 1..127: mol_type = other DNA

SEQ ID NO: 21324 - DNA, 126 bp, synthetic construct; identical to SEQ ID NO: 20347
  source 1..126: mol_type = other DNA

SEQ ID NO: 21325 - DNA, 125 bp, synthetic construct; identical to SEQ ID NO: 20348
  source 1..125: mol_type = other DNA

SEQ ID NO: 21326 - DNA, 124 bp, synthetic construct; identical to SEQ ID NO: 20349
  source 1..124: mol_type = other DNA

SEQ ID NO: 21327 - DNA, 123 bp, synthetic construct; identical to SEQ ID NO: 20350
  source 1..123: mol_type = other DNA

SEQ ID NO: 21328 - DNA, 131 bp, synthetic construct; identical to SEQ ID NO: 20351
  source 1..131: mol_type = other DNA

SEQ ID NO: 21329 - DNA, 130 bp, synthetic construct; identical to SEQ ID NO: 20352
  source 1..130: mol_type = other DNA

SEQ ID NO: 21330 - DNA, 129 bp, synthetic construct; identical to SEQ ID NO: 20353
  source 1..129: mol_type = other DNA

SEQ ID NO: 21331 - DNA, 128 bp, synthetic construct; identical to SEQ ID NO: 20354
  source 1..128: mol_type = other DNA

SEQ ID NO: 21332 - DNA, 127 bp, synthetic construct; identical to SEQ ID NO: 20355
  source 1..127: mol_type = other DNA

SEQ ID NO: 21333 - DNA, 126 bp, synthetic construct; identical to SEQ ID NO: 20356
  source 1..126: mol_type = other DNA

SEQ ID NO: 21334 - DNA, 125 bp, synthetic construct; identical to SEQ ID NO: 20357
  source 1..125: mol_type = other DNA

SEQ ID NO: 21335 - DNA, 124 bp, synthetic construct; identical to SEQ ID NO: 20358
  source 1..124: mol_type = other DNA

SEQ ID NO: 21336 - DNA, 123 bp, synthetic construct; identical to SEQ ID NO: 20359
  source 1..123: mol_type = other DNA

SEQ ID NO: 21337 - DNA, 122 bp, synthetic construct; identical to SEQ ID NO: 20360
  source 1..122: mol_type = other DNA

SEQ ID NO: 21338 - DNA, 130 bp, synthetic construct; identical to SEQ ID NO: 20361
  source 1..130: mol_type = other DNA

SEQ ID NO: 21339 - DNA, 129 bp, synthetic construct; identical to SEQ ID NO: 20362
  source 1..129: mol_type = other DNA

SEQ ID NO: 21340 - DNA, 128 bp, synthetic construct; identical to SEQ ID NO: 20363
  source 1..128: mol_type = other DNA

SEQ ID NO: 21341 - DNA, 127 bp, synthetic construct; identical to SEQ ID NO: 20364
  source 1..127: mol_type = other DNA

SEQ ID NO: 21342 - DNA, 126 bp, synthetic construct; identical to SEQ ID NO: 20365
  source 1..126: mol_type = other DNA

SEQ ID NO: 21343 - DNA, 125 bp, synthetic construct; identical to SEQ ID NO: 20366
  source 1..125: mol_type = other DNA

SEQ ID NO: 21344 - DNA, 124 bp, synthetic construct; identical to SEQ ID NO: 20367
  source 1..124: mol_type = other DNA

SEQ ID NO: 21345 - DNA, 123 bp, synthetic construct; identical to SEQ ID NO: 20368
  source 1..123: mol_type = other DNA

SEQ ID NO: 21346 - DNA, 122 bp, synthetic construct; identical to SEQ ID NO: 20369
  source 1..122: mol_type = other DNA

SEQ ID NO: 21347 - DNA, 121 bp, synthetic construct; identical to SEQ ID NO: 20370
  source 1..121: mol_type = other DNA

SEQ ID NO: 21348 - DNA, 129 bp, synthetic construct; identical to SEQ ID NO: 20371
  source 1..129: mol_type = other DNA

SEQ ID NO: 21349 - DNA, 128 bp, synthetic construct; identical to SEQ ID NO: 20372
  source 1..128: mol_type = other DNA

SEQ ID NO: 21350 - DNA, 127 bp, synthetic construct; identical to SEQ ID NO: 20373
  source 1..127: mol_type = other DNA

SEQ ID NO: 21351 - DNA, 126 bp, synthetic construct; identical to SEQ ID NO: 20374
  source 1..126: mol_type = other DNA

SEQ ID NO: 21352 - DNA, 125 bp, synthetic construct; identical to SEQ ID NO: 20375
  source 1..125: mol_type = other DNA

SEQ ID NO: 21353 - DNA, 124 bp, synthetic construct; identical to SEQ ID NO: 20376
  source 1..124: mol_type = other DNA

SEQ ID NO: 21354 - DNA, 123 bp, synthetic construct; identical to SEQ ID NO: 20377
  source 1..123: mol_type = other DNA

SEQ ID NO: 21355 - DNA, 122 bp, synthetic construct; identical to SEQ ID NO: 20378
  source 1..122: mol_type = other DNA

SEQ ID NO: 21356 - DNA, 121 bp, synthetic construct; identical to SEQ ID NO: 20379
  source 1..121: mol_type = other DNA

SEQ ID NO: 21357 - DNA, 120 bp, synthetic construct; identical to SEQ ID NO: 20380
  source 1..120: mol_type = other DNA

SEQ ID NO: 21358 - DNA, 128 bp, synthetic construct
  source 1..128: mol_type = other DNA
gtaacggcagacttctccacgttttagagctagaaatagcaagttaaaataaggctagtccgttatcaacttgaaaaagtggcaccgagtcggtgccacctgactcctgaggagaagtctgccgttac

SEQ ID NO: 21359 - DNA, 127 bp, synthetic construct
  source 1..127: mol_type = other DNA
gtaacggcagacttctccacgttttagagctagaaatagcaagttaaaataaggctagtccgttatcaacttgaaaaagtggcaccgagtcggtgccacctgactcctgaggagaagtctgccgtta

SEQ ID NO: 21360 - DNA, 126 bp, synthetic construct
  source 1..126: mol_type = other DNA
gtaacggcagacttctccacgttttagagctagaaatagcaagttaaaataaggctagtccgttatcaacttgaaaaagtggcaccgagtcggtgccacctgactcctgaggagaagtctgccgtt

SEQ ID NO: 21361 - DNA, 125 bp, synthetic construct
  source 1..125: mol_type = other DNA
gtaacggcagacttctccacgttttagagctagaaatagcaagttaaaataaggctagtccgttatcaacttgaaaaagtggcaccgagtcggtgccacctgactcctgaggagaagtctgccgt

SEQ ID NO: 21362 - DNA, 124 bp, synthetic construct
  source 1..124: mol_type = other DNA
gtaacggcagacttctccacgttttagagctagaaatagcaagttaaaataaggctagtccgttatcaacttgaaaaagtggcaccgagtcggtgccacctgactcctgaggagaagtctgccg

SEQ ID NO: 21363 - DNA, 123 bp, synthetic construct
  source 1..123: mol_type = other DNA
gtaacggcagacttctccacgttttagagctagaaatagcaagttaaaataaggctagtccgttatcaacttgaaaaagtggcaccgagtcggtgccacctgactcctgaggagaagtctgcc

SEQ ID NO: 21364 - DNA, 122 bp, synthetic construct
  source 1..122: mol_type = other DNA
gtaacggcagacttctccacgttttagagctagaaatagcaagttaaaataaggctagtccgttatcaacttgaaaaagtggcaccgagtcggtgccacctgactcctgaggagaagtctgc

SEQ ID NO: 21365 - DNA, 121 bp, synthetic construct
  source 1..121: mol_type = other DNA
gtaacggcagacttctccacgttttagagctagaaatagcaagttaaaataaggctagtccgttatcaacttgaaaaagtggcaccgagtcggtgccacctgactcctgaggagaagtctg

SEQ ID NO: 21366 - DNA, 120 bp, synthetic construct
  source 1..120: mol_type = other DNA
gtaacggcagacttctccacgttttagagctagaaatagcaagttaaaataaggctagtccgttatcaacttgaaaaagtggcaccgagtcggtgccacctgactcctgaggagaagtct

SEQ ID NO: 21367 - DNA, 119 bp, synthetic construct
  source 1..119: mol_type = other DNA
gtaacggcagacttctccacgttttagagctagaaatagcaagttaaaataaggctagtccgttatcaacttgaaaaagtggcaccgagtcggtgccacctgactcctgaggagaagtc

SEQ ID NO: 21368 - DNA, 127 bp, synthetic construct; identical to SEQ ID NO: 20381
  source 1..127: mol_type = other DNA

SEQ ID NO: 21369 - DNA, 126 bp, synthetic construct; identical to SEQ ID NO: 20382
  source 1..126: mol_type = other DNA

SEQ ID NO: 21370 - DNA, 125 bp, synthetic construct; identical to SEQ ID NO: 20383
  source 1..125: mol_type = other DNA

SEQ ID NO: 21371 - DNA, 124 bp, synthetic construct; identical to SEQ ID NO: 20384
  source 1..124: mol_type = other DNA

SEQ ID NO: 21372 - DNA, 123 bp, synthetic construct; identical to SEQ ID NO: 20385
  source 1..123: mol_type = other DNA

SEQ ID NO: 21373 - DNA, 122 bp, synthetic construct; identical to SEQ ID NO: 20386
  source 1..122: mol_type = other DNA

SEQ ID NO: 21374 - DNA, 121 bp, synthetic construct; identical to SEQ ID NO: 20387
  source 1..121: mol_type = other DNA

SEQ ID NO: 21375 - DNA, 120 bp, synthetic construct; identical to SEQ ID NO: 20388
  source 1..120: mol_type = other DNA

SEQ ID NO: 21376 - DNA, 119 bp, synthetic construct; identical to SEQ ID NO: 20389
  source 1..119: mol_type = other DNA

SEQ ID NO: 21377 - DNA, 118 bp, synthetic construct; identical to SEQ ID NO: 20390
  source 1..118: mol_type = other DNA

SEQ ID NO: 21378 - DNA, 126 bp, synthetic construct
  source 1..126: mol_type = other DNA
gtaacggcagacttctccacgttttagagctagaaatagcaagttaaaataaggctagtccgttatcaacttgaaaaagtggcaccgagtcggtgccctgactcctgaggagaagtctgccgttac

SEQ ID NO: 21379 - DNA, 125 bp, synthetic construct
  source 1..125: mol_type = other DNA
gtaacggcagacttctccacgttttagagctagaaatagcaagttaaaataaggctagtccgttatcaacttgaaaaagtggcaccgagtcggtgccctgactcctgaggagaagtctgccgtta

SEQ ID NO: 21380 - DNA, 124 bp, synthetic construct
  source 1..124: mol_type = other DNA
gtaacggcagacttctccacgttttagagctagaaatagcaagttaaaataaggctagtccgttatcaacttgaaaaagtggcaccgagtcggtgccctgactcctgaggagaagtctgccgtt

SEQ ID NO: 21381 - DNA, 123 bp, synthetic construct
  source 1..123: mol_type = other DNA
gtaacggcagacttctccacgttttagagctagaaatagcaagttaaaataaggctagtccgttatcaacttgaaaaagtggcaccgagtcggtgccctgactcctgaggagaagtctgccgt

SEQ ID NO: 21382 - DNA, 122 bp, synthetic construct
  source 1..122: mol_type = other DNA
gtaacggcagacttctccacgttttagagctagaaatagcaagttaaaataaggctagtccgttatcaacttgaaaaagtggcaccgagtcggtgccctgactcctgaggagaagtctgccg

SEQ ID NO: 21383 - DNA, 121 bp, synthetic construct
  source 1..121: mol_type = other DNA
gtaacggcagacttctccacgttttagagctagaaatagcaagttaaaataaggctagtccgttatcaacttgaaaaagtggcaccgagtcggtgccctgactcctgaggagaagtctgcc

SEQ ID NO: 21384 - DNA, 120 bp, synthetic construct
  source 1..120: mol_type = other DNA
gtaacggcagacttctccacgttttagagctagaaatagcaagttaaaataaggctagtccgttatcaacttgaaaaagtggcaccgagtcggtgccctgactcctgaggagaagtctgc

SEQ ID NO: 21385 - DNA, 119 bp, synthetic construct
  source 1..119: mol_type = other DNA
gtaacggcagacttctccacgttttagagctagaaatagcaagttaaaataaggctagtccgttatcaacttgaaaaagtggcaccgagtcggtgccctgactcctgaggagaagtctg

SEQ ID NO: 21386 - DNA, 118 bp, synthetic construct
  source 1..118: mol_type = other DNA
gtaacggcagacttctccacgttttagagctagaaatagcaagttaaaataaggctagtccgttatcaacttgaaaaagtggcaccgagtcggtgccctgactcctgaggagaagtct

SEQ ID NO: 21387 - DNA, 117 bp, synthetic construct
  source 1..117: mol_type = other DNA
gtaacggcagacttctccacgttttagagctagaaatagcaagttaaaataaggctagtccgttatcaacttgaaaaagtggcaccgagtcggtgccctgactcctgaggagaagtc

SEQ ID NO: 21388 - DNA, 125 bp, synthetic construct
  source 1..125: mol_type = other DNA
gtaacggcagacttctccacgttttagagctagaaatagcaagttaaaataaggctagtccgttatcaacttgaaaaagtggcaccgagtcggtgcctgactcctgaggagaagtctgccgttac

SEQ ID NO: 21389 - DNA, 124 bp, synthetic construct
  source 1..124: mol_type = other DNA
gtaacggcagacttctccacgttttagagctagaaatagcaagttaaaataaggctagtccgttatcaacttgaaaaagtggcaccgagtcggtgcctgactcctgaggagaagtctgccgtta

SEQ ID NO: 21390 - DNA, 123 bp, synthetic construct
  source 1..123: mol_type = other DNA
gtaacggcagacttctccacgttttagagctagaaatagcaagttaaaataaggctagtccgttatcaacttgaaaaagtggcaccgagtcggtgcctgactcctgaggagaagtctgccgtt

SEQ ID NO: 21391 - DNA, 122 bp, synthetic construct
  source 1..122: mol_type = other DNA
gtaacggcagacttctccacgttttagagctagaaatagcaagttaaaataaggctagtccgttatcaacttgaaaaagtggcaccgagtcggtgcctgactcctgaggagaagtctgccgt

SEQ ID NO: 21392 - DNA, 121 bp, synthetic construct
  source 1..121: mol_type = other DNA
gtaacggcagacttctccacgttttagagctagaaatagcaagttaaaataaggctagtccgttatcaacttgaaaaagtggcaccgagtcggtgcctgactcctgaggagaagtctgccg

SEQ ID NO: 21393 - DNA, 120 bp, synthetic construct
  source 1..120: mol_type = other DNA
gtaacggcagacttctccacgttttagagctagaaatagcaagttaaaataaggctagtccgttatcaacttgaaaaagtggcaccgagtcggtgcctgactcctgaggagaagtctgcc

SEQ ID NO: 21394 - DNA, 119 bp, synthetic construct
  source 1..119: mol_type = other DNA
gtaacggcagacttctccacgttttagagctagaaatagcaagttaaaataaggctagtccgttatcaacttgaaaaagtggcaccgagtcggtgcctgactcctgaggagaagtctgc

SEQ ID NO: 21395 - DNA, 118 bp, synthetic construct
  source 1..118: mol_type = other DNA
gtaacggcagacttctccacgttttagagctagaaatagcaagttaaaataaggctagtccgttatcaacttgaaaaagtggcaccgagtcggtgcctgactcctgaggagaagtctg

SEQ ID NO: 21396 - DNA, 117 bp, synthetic construct
  source 1..117: mol_type = other DNA
gtaacggcagacttctccacgttttagagctagaaatagcaagttaaaataaggctagtccgttatcaacttgaaaaagtggcaccgagtcggtgcctgactcctgaggagaagtct

SEQ ID NO: 21397 - DNA, 116 bp, synthetic construct
  source 1..116: mol_type = other DNA
gtaacggcagacttctccacgttttagagctagaaatagcaagttaaaataaggctagtccgttatcaacttgaaaaagtggcaccgagtcggtgcctgactcctgaggagaagtc

SEQ ID NO: 21398 - DNA, 124 bp, synthetic construct; identical to SEQ ID NO: 20391
  source 1..124: mol_type = other DNA

SEQ ID NO: 21399 - DNA, 123 bp, synthetic construct; identical to SEQ ID NO: 20392
  source 1..123: mol_type = other DNA

SEQ ID NO: 21400 - DNA, 122 bp, synthetic construct; identical to SEQ ID NO: 20393
  source 1..122: mol_type = other DNA

SEQ ID NO: 21401 - DNA, 121 bp, synthetic construct; identical to SEQ ID NO: 20394
  source 1..121: mol_type = other DNA

SEQ ID NO: 21402 - DNA, 120 bp, synthetic construct; identical to SEQ ID NO: 20395
  source 1..120: mol_type = other DNA

SEQ ID NO: 21403 - DNA, 119 bp, synthetic construct; identical to SEQ ID NO: 20396
  source 1..119: mol_type = other DNA

SEQ ID NO: 21404 - DNA, 118 bp, synthetic construct; identical to SEQ ID NO: 20397
  source 1..118: mol_type = other DNA

SEQ ID NO: 21405 - DNA, 117 bp, synthetic construct; identical to SEQ ID NO: 20398
  source 1..117: mol_type = other DNA

SEQ ID NO: 21406 - DNA, 116 bp, synthetic construct; identical to SEQ ID NO: 20399
  source 1..116: mol_type = other DNA

SEQ ID NO: 21407 - DNA, 115 bp, synthetic construct; identical to SEQ ID NO: 20400
  source 1..115: mol_type = other DNA

SEQ ID NO: 21408 - DNA, 123 bp, synthetic construct; identical to SEQ ID NO: 20401
  source 1..123: mol_type = other DNA

SEQ ID NO: 21409 - DNA, 122 bp, synthetic construct; identical to SEQ ID NO: 20402
  source 1..122: mol_type = other DNA

SEQ ID NO: 21410 - DNA, 121 bp, synthetic construct; identical to SEQ ID NO: 20403
  source 1..121: mol_type = other DNA

SEQ ID NO: 21411 - DNA, 120 bp, synthetic construct; identical to SEQ ID NO: 20404
  source 1..120: mol_type = other DNA

SEQ ID NO: 21412 - DNA, 119 bp, synthetic construct; identical to SEQ ID NO: 20405
  source 1..119: mol_type = other DNA

SEQ ID NO: 21413 - DNA, 118 bp, synthetic construct; identical to SEQ ID NO: 20406
  source 1..118: mol_type = other DNA

SEQ ID NO: 21414 - DNA, 117 bp, synthetic construct; identical to SEQ ID NO: 20407
  source 1..117: mol_type = other DNA

SEQ ID NO: 21415 - DNA, 116 bp, synthetic construct; identical to SEQ ID NO: 20408
  source 1..116: mol_type = other DNA

SEQ ID NO: 21416 - DNA, 115 bp, synthetic construct; identical to SEQ ID NO: 20409
  source 1..115: mol_type = other DNA

SEQ ID NO: 21417 - DNA, 114 bp, synthetic construct; identical to SEQ ID NO: 20410
  source 1..114: mol_type = other DNA

SEQ ID NO: 21418 - DNA, 122 bp, synthetic construct; identical to SEQ ID NO: 20411
  source 1..122: mol_type = other DNA

SEQ ID NO: 21419 - DNA, 121 bp, synthetic construct; identical to SEQ ID NO: 20412
  source 1..121: mol_type = other DNA

SEQ ID NO: 21420 - DNA, 120 bp, synthetic construct; identical to SEQ ID NO: 20413
  source 1..120: mol_type = other DNA

SEQ ID NO: 21421 - DNA, 119 bp, synthetic construct; identical to SEQ ID NO: 20414
  source 1..119: mol_type = other DNA

SEQ ID NO: 21422 - DNA, 118 bp, synthetic construct; identical to SEQ ID NO: 20415
  source 1..118: mol_type = other DNA

SEQ ID NO: 21423 - DNA, 117 bp, synthetic construct; identical to SEQ ID NO: 20416
  source 1..117: mol_type = other DNA

SEQ ID NO: 21424 - DNA, 116 bp, synthetic construct; identical to SEQ ID NO: 20417
  source 1..116: mol_type = other DNA

SEQ ID NO: 21425 - DNA, 115 bp, synthetic construct; identical to SEQ ID NO: 20418
  source 1..115: mol_type = other DNA

SEQ ID NO: 21426 - DNA, 114 bp, synthetic construct; identical to SEQ ID NO: 20419
  source 1..114: mol_type = other DNA

SEQ ID NO: 21427 - DNA, 113 bp, synthetic construct; identical to SEQ ID NO: 20420
  source 1..113: mol_type = other DNA

SEQ ID NO: 21428 - DNA, 121 bp, synthetic construct
  source 1..121: mol_type = other DNA
gtaacggcagacttctccacgttttagagctagaaatagcaagttaaaataaggctagtccgttatcaacttgaaaaagtggcaccgagtcggtgcctcctgaggagaagtctgccgttac

SEQ ID NO: 21429 - DNA, 120 bp, synthetic construct
  source 1..120: mol_type = other DNA
gtaacggcagacttctccacgttttagagctagaaatagcaagttaaaataaggctagtccgttatcaacttgaaaaagtggcaccgagtcggtgcctcctgaggagaagtctgccgtta

SEQ ID NO: 21430 - DNA, 119 bp, synthetic construct
  source 1..119: mol_type = other DNA
gtaacggcagacttctccacgttttagagctagaaatagcaagttaaaataaggctagtccgttatcaacttgaaaaagtggcaccgagtcggtgcctcctgaggagaagtctgccgtt

SEQ ID NO: 21431 - DNA, 118 bp, synthetic construct
  source 1..118: mol_type = other DNA
gtaacggcagacttctccacgttttagagctagaaatagcaagttaaaataaggctagtccgttatcaacttgaaaaagtggcaccgagtcggtgcctcctgaggagaagtctgccgt

SEQ ID NO: 21432 - DNA, 117 bp, synthetic construct
  source 1..117: mol_type = other DNA
gtaacggcagacttctccacgttttagagctagaaatagcaagttaaaataaggctagtccgttatcaacttgaaaaagtggcaccgagtcggtgcctcctgaggagaagtctgccg

SEQ ID NO: 21433 - DNA, 116 bp, synthetic construct
  source 1..116: mol_type = other DNA
gtaacggcagacttctccacgttttagagctagaaatagcaagttaaaataaggctagtccgttatcaacttgaaaaagtggcaccgagtcggtgcctcctgaggagaagtctgcc

SEQ ID NO: 21434 - DNA, 115 bp, synthetic construct
  source 1..115: mol_type = other DNA
gtaacggcagacttctccacgttttagagctagaaatagcaagttaaaataaggctagtccgttatcaacttgaaaaagtggcaccgagtcggtgcctcctgaggagaagtctgc

SEQ ID NO: 21435 - DNA, 114 bp, synthetic construct
  source 1..114: mol_type = other DNA
gtaacggcagacttctccacgttttagagctagaaatagcaagttaaaataaggctagtccgttatcaacttgaaaaagtggcaccgagtcggtgcctcctgaggagaagtctg

SEQ ID NO: 21436 - DNA, 113 bp, synthetic construct
  source 1..113: mol_type = other DNA
gtaacggcagacttctccacgttttagagctagaaatagcaagttaaaataaggctagtccgttatcaacttgaaaaagtggcaccgagtcggtgcctcctgaggagaagtct

SEQ ID NO: 21437 - DNA, 112 bp, synthetic construct
  source 1..112: mol_type = other DNA
gtaacggcagacttctccacgttttagagctagaaatagcaagttaaaataaggctagtccgttatcaacttgaaaaagtggcaccgagtcggtgcctcctgaggagaagtc

SEQ ID NO: 21438 - DNA, 136 bp, synthetic construct
  source 1..136: mol_type = other DNA
gtaacggcagacttctccacgttttagagctagaaatagcaagttaaaataaggctagtccgttatcaacttgaaaaagtggcaccgagtcggtgcccatggtgcacctgactcctgcggagaagtctgccgttac

SEQ ID NO: 21439 - DNA, 135 bp, synthetic construct
  source 1..135: mol_type = other DNA
gtaacggcagacttctccacgttttagagctagaaatagcaagttaaaataaggctagtccgttatcaacttgaaaaagtggcaccgagtcggtgcccatggtgcacctgactcctgcggagaagtctgccgtta

SEQ ID NO: 21440 - DNA, 134 bp, synthetic construct
  source 1..134: mol_type = other DNA
gtaacggcagacttctccacgttttagagctagaaatagcaagttaaaataaggctagtccgttatcaacttgaaaaagtggcaccgagtcggtgcccatggtgcacctgactcctgcggagaagtctgccgtt

SEQ ID NO: 21441 - DNA, 133 bp, synthetic construct
  source 1..133: mol_type = other DNA
gtaacggcagacttctccacgttttagagctagaaatagcaagttaaaataaggctagtccgttatcaacttgaaaaagtggcaccgagtcggtgcccatggtgcacctgactcctgcggagaagtctgccgt

SEQ ID NO: 21442 - DNA, 132 bp, synthetic construct
  source 1..132: mol_type = other DNA
gtaacggcagacttctccacgttttagagctagaaatagcaagttaaaataaggctagtccgttatcaacttgaaaaagtggcaccgagtcggtgcccatggtgcacctgactcctgcggagaagtctgccg

SEQ ID NO: 21443 - DNA, 131 bp, synthetic construct
  source 1..131: mol_type = other DNA
gtaacggcagacttctccacgttttagagctagaaatagcaagttaaaataaggctagtccgttatcaacttgaaaaagtggcaccgagtcggtgcccatggtgcacctgactcctgcggagaagtctgcc

SEQ ID NO: 21444 - DNA, 130 bp, synthetic construct
  source 1..130: mol_type = other DNA
gtaacggcagacttctccacgttttagagctagaaatagcaagttaaaataaggctagtccgttatcaacttgaaaaagtggcaccgagtcggtgcccatggtgcacctgactcctgcggagaagtctgc

SEQ ID NO: 21445 - DNA, 129 bp, synthetic construct
  source 1..129: mol_type = other DNA
gtaacggcagacttctccacgttttagagctagaaatagcaagttaaaataaggctagtccgttatcaacttgaaaaagtggcaccgagtcggtgcccatggtgcacctgactcctgcggagaagtctg

SEQ ID NO: 21446 - DNA, 128 bp, synthetic construct
  source 1..128: mol_type = other DNA
gtaacggcagacttctccacgttttagagctagaaatagcaagttaaaataaggctagtccgttatcaacttgaaaaagtggcaccgagtcggtgcccatggtgcacctgactcctgcggagaagtct

SEQ ID NO: 21447 - DNA, 127 bp, synthetic construct
  source 1..127: mol_type = other DNA
gtaacggcagacttctccacgttttagagctagaaatagcaagttaaaataaggctagtccgttatcaacttgaaaaagtggcaccgagtcggtgcccatggtgcacctgactcctgcggagaagtc

SEQ ID NO: 21448 - DNA, 135 bp, synthetic construct
  source 1..135: mol_type = other DNA
gtaacggcagacttctccacgttttagagctagaaatagcaagttaaaataaggctagtccgttatcaacttgaaaaagtggcaccgagtcggtgccatggtgcacctgactcctgcggagaagtctgccgttac

SEQ ID NO: 21449 - DNA, 134 bp, synthetic construct
  source 1..134: mol_type = other DNA
gtaacggcagacttctccacgttttagagctagaaatagcaagttaaaataaggctagtccgttatcaacttgaaaaagtggcaccgagtcggtgccatggtgcacctgactcctgcggagaagtctgccgtta

SEQ ID NO: 21450 - DNA, 133 bp, synthetic construct
  source 1..133: mol_type = other DNA
gtaacggcagacttctccacgttttagagctagaaatagcaagttaaaataaggctagtccgttatcaacttgaaaaagtggcaccgagtcggtgccatggtgcacctgactcctgcggagaagtctgccgtt

SEQ ID NO: 21451 - DNA, 132 bp, synthetic construct
  source 1..132: mol_type = other DNA
gtaacggcagacttctccacgttttagagctagaaatagcaagttaaaataaggctagtccgttatcaacttgaaaaagtggcaccgagtcggtgccatggtgcacctgactcctgcggagaagtctgccgt

SEQ ID NO: 21452 - DNA, 131 bp, synthetic construct
  source 1..131: mol_type = other DNA
gtaacggcagacttctccacgttttagagctagaaatagcaagttaaaataaggctagtccgttatcaacttgaaaaagtggcaccgagtcggtgccatggtgcacctgactcctgcggagaagtctgccg

SEQ ID NO: 21453 - DNA, 130 bp, synthetic construct
  source 1..130: mol_type = other DNA
gtaacggcagacttctccacgttttagagctagaaatagcaagttaaaataaggctagtccgttatcaacttgaaaaagtggcaccgagtcggtgccatggtgcacctgactcctgcggagaagtctgcc

SEQ ID NO: 21454 - DNA, 129 bp, synthetic construct
  source 1..129: mol_type = other DNA
gtaacggcagacttctccacgttttagagctagaaatagcaagttaaaataaggctagtccgttatcaacttgaaaaagtggcaccgagtcggtgccatggtgcacctgactcctgcggagaagtctgc

SEQ ID NO: 21455 - DNA, 128 bp, synthetic construct
  source 1..128: mol_type = other DNA
gtaacggcagacttctccacgttttagagctagaaatagcaagttaaaataaggctagtccgttatcaacttgaaaaagtggcaccgagtcggtgccatggtgcacctgactcctgcggagaagtctg

SEQ ID NO: 21456 - DNA, 127 bp, synthetic construct
  source 1..127: mol_type = other DNA
gtaacggcagacttctccacgttttagagctagaaatagcaagttaaaataaggctagtccgttatcaacttgaaaaagtggcaccgagtcggtgccatggtgcacctgactcctgcggagaagtct

SEQ ID NO: 21457 - DNA, 126 bp, synthetic construct
  source 1..126: mol_type = other DNA
gtaacggcagacttctccacgttttagagctagaaatagcaagttaaaataaggctagtccgttatcaacttgaaaaagtggcaccgagtcggtgccatggtgcacctgactcctgcggagaagtc

SEQ ID NO: 21458 - DNA, 134 bp, synthetic construct
  source 1..134: mol_type = other DNA
gtaacggcagacttctccacgttttagagctagaaatagcaagttaaaataaggctagtccgttatcaacttgaaaaagtggcaccgagtcggtgcatggtgcacctgactcctgcggagaagtctgccgttac

SEQ ID NO: 21459 - DNA, 133 bp, synthetic construct
  source 1..133: mol_type = other DNA
gtaacggcagacttctccacgttttagagctagaaatagcaagttaaaataaggctagtccgttatcaacttgaaaaagtggcaccgagtcggtgcatggtgcacctgactcctgcggagaagtctgccgtta

SEQ ID NO: 21460 - DNA, 132 bp, synthetic construct
  source 1..132: mol_type = other DNA
gtaacggcagacttctccacgttttagagctagaaatagcaagttaaaataaggctagtccgttatcaacttgaaaaagtggcaccgagtcggtgcatggtgcacctgactcctgcggagaagtctgccgtt

SEQ ID NO: 21461 - DNA, 131 bp, synthetic construct
  source 1..131: mol_type = other DNA
gtaacggcagacttctccacgttttagagctagaaatagcaagttaaaataaggctagtccgttatcaacttgaaaaagtggcaccgagtcggtgcatggtgcacctgactcctgcggagaagtctgccgt

SEQ ID NO: 21462 - DNA, 130 bp, synthetic construct
  source 1..130: mol_type = other DNA
gtaacggcagacttctccacgttttagagctagaaatagcaagttaaaataaggctagtccgttatcaacttgaaaaagtggcaccgagtcggtgcatggtgcacctgactcctgcggagaagtctgccg

SEQ ID NO: 21463 - DNA, 129 bp, synthetic construct
  source 1..129: mol_type = other DNA
gtaacggcagacttctccacgttttagagctagaaatagcaagttaaaataaggctagtccgttatcaacttgaaaaagtggcaccgagtcggtgcatggtgcacctgactcctgcggagaagtctgcc

SEQ ID NO: 21464 - DNA, 128 bp, synthetic construct
  source 1..128: mol_type = other DNA
gtaacggcagacttctccacgttttagagctagaaatagcaagttaaaataaggctagtccgttatcaacttgaaaaagtggcaccgagtcggtgcatggtgcacctgactcctgcggagaagtctgc

SEQ ID NO: 21465 - DNA, 127 bp, synthetic construct
  source 1..127: mol_type = other DNA
gtaacggcagacttctccacgttttagagctagaaatagcaagttaaaataaggctagtccgttatcaacttgaaaaagtggcaccgagtcggtgcatggtgcacctgactcctgcggagaagtctg

SEQ ID NO: 21466 - DNA, 126 bp, synthetic construct
  source 1..126: mol_type = other DNA
gtaacggcagacttctccacgttttagagctagaaatagcaagttaaaataaggctagtccgttatcaacttgaaaaagtggcaccgagtcggtgcatggtgcacctgactcctgcggagaagtct

SEQ ID NO: 21467 - DNA, 125 bp, synthetic construct
  source 1..125: mol_type = other DNA
gtaacggcagacttctccacgttttagagctagaaatagcaagttaaaataaggctagtccgttatcaacttgaaaaagtggcaccgagtcggtgcatggtgcacctgactcctgcggagaagtc

SEQ ID NO: 21468 - DNA, 133 bp, synthetic construct
  source 1..133: mol_type = other DNA
gtaacggcagacttctccacgttttagagctagaaatagcaagttaaaataaggctagtccgttatcaacttgaaaaagtggcaccgagtcggtgctggtgcacctgactcctgcggagaagtctgccgttac

SEQ ID NO: 21469 - DNA, 132 bp, synthetic construct
  source 1..132: mol_type = other DNA
gtaacggcagacttctccacgttttagagctagaaatagcaagttaaaataaggctagtccgttatcaacttgaaaaagtggcaccgagtcggtgctggtgcacctgactcctgcggagaagtctgccgtta

SEQ ID NO: 21470 - DNA, 131 bp, synthetic construct
  source 1..131: mol_type = other DNA
gtaacggcagacttctccacgttttagagctagaaatagcaagttaaaataaggctagtccgttatcaacttgaaaaagtggcaccgagtcggtgctggtgcacctgactcctgcggagaagtctgccgtt

SEQ ID NO: 21471 - DNA, 130 bp, synthetic construct
  source 1..130: mol_type = other DNA
gtaacggcagacttctccacgttttagagctagaaatagcaagttaaaataaggctagtccgttatcaacttgaaaaagtggcaccgagtcggtgctggtgcacctgactcctgcggagaagtctgccgt

SEQ ID NO: 21472 - DNA, 129 bp, synthetic construct
  source 1..129: mol_type = other DNA
gtaacggcagacttctccacgttttagagctagaaatagcaagttaaaataaggctagtccgttatcaacttgaaaaagtggcaccgagtcggtgctggtgcacctgactcctgcggagaagtctgccg

SEQ ID NO: 21473 - DNA, 128 bp, synthetic construct
  source 1..128: mol_type = other DNA
gtaacggcagacttctccacgttttagagctagaaatagcaagttaaaataaggctagtccgttatcaacttgaaaaagtggcaccgagtcggtgctggtgcacctgactcctgcggagaagtctgcc

SEQ ID NO: 21474 - DNA, 127 bp, synthetic construct
  source 1..127: mol_type = other DNA
gtaacggcagacttctccacgttttagagctagaaatagcaagttaaaataaggctagtccgttatcaacttgaaaaagtggcaccgagtcggtgctggtgcacctgactcctgcggagaagtctgc

SEQ ID NO: 21475 - DNA, 126 bp, synthetic construct
  source 1..126: mol_type = other DNA
gtaacggcagacttctccacgttttagagctagaaatagcaagttaaaataaggctagtccgttatcaacttgaaaaagtggcaccgagtcggtgctggtgcacctgactcctgcggagaagtctg

SEQ ID NO: 21476 - DNA, 125 bp, synthetic construct
  source 1..125: mol_type = other DNA
gtaacggcagacttctccacgttttagagctagaaatagcaagttaaaataaggctagtccgttatcaacttgaaaaagtggcaccgagtcggtgctggtgcacctgactcctgcggagaagtct

SEQ ID NO: 21477 - DNA, 124 bp, synthetic construct
  source 1..124: mol_type = other DNA
gtaacggcagacttctccacgttttagagctagaaatagcaagttaaaataaggctagtccgttatcaacttgaaaaagtggcaccgagtcggtgctggtgcacctgactcctgcggagaagtc

SEQ ID NO: 21478 - DNA, 132 bp, synthetic construct
  source 1..132: mol_type = other DNA
gtaacggcagacttctccacgttttagagctagaaatagcaagttaaaataaggctagtccgttatcaacttgaaaaagtggcaccgagtcggtgcggtgcacctgactcctgcggagaagtctgccgttac

SEQ ID NO: 21479 - DNA, 131 bp, synthetic construct
  source 1..131: mol_type = other DNA
gtaacggcagacttctccacgttttagagctagaaatagcaagttaaaataaggctagtccgttatcaacttgaaaaagtggcaccgagtcggtgcggtgcacctgactcctgcggagaagtctgccgtta

SEQ ID NO: 21480 - DNA, 130 bp, synthetic construct
  source 1..130: mol_type = other DNA
gtaacggcagacttctccacgttttagagctagaaatagcaagttaaaataaggctagtccgttatcaacttgaaaaagtggcaccgagtcggtgcggtgcacctgactcctgcggagaagtctgccgtt

SEQ ID NO: 21481 - DNA, 129 bp, synthetic construct
  source 1..129: mol_type = other DNA
gtaacggcagacttctccacgttttagagctagaaatagcaagttaaaataaggctagtccgttatcaacttgaaaaagtggcaccgagtcggtgcggtgcacctgactcctgcggagaagtctgccgt

SEQ ID NO: 21482 - DNA, 128 bp, synthetic construct
  source 1..128: mol_type = other DNA
gtaacggcagacttctccacgttttagagctagaaatagcaagttaaaataaggctagtccgttatcaacttgaaaaagtggcaccgagtcggtgcggtgcacctgactcctgcggagaagtctgccg

SEQ ID NO: 21483 - DNA, 127 bp, synthetic construct
  source 1..127: mol_type = other DNA
gtaacggcagacttctccacgttttagagctagaaatagcaagttaaaataaggctagtccgttatcaacttgaaaaagtggcaccgagtcggtgcggtgcacctgactcctgcggagaagtctgcc

SEQ ID NO: 21484 - DNA, 126 bp, synthetic construct
  source 1..126: mol_type = other DNA
gtaacggcagacttctccacgttttagagctagaaatagcaagttaaaataaggctagtccgttatcaacttgaaaaagtggcaccgagtcggtgcggtgcacctgactcctgcggagaagtctgc

SEQ ID NO: 21485 - DNA, 125 bp, synthetic construct
  source 1..125: mol_type = other DNA
gtaacggcagacttctccacgttttagagctagaaatagcaagttaaaataaggctagtccgttatcaacttgaaaaagtggcaccgagtcggtgcggtgcacctgactcctgcggagaagtctg

SEQ ID NO: 21486 - DNA, 124 bp, synthetic construct
  source 1..124: mol_type = other DNA
gtaacggcagacttctccacgttttagagctagaaatagcaagttaaaataaggctagtccgttatcaacttgaaaaagtggcaccgagtcggtgcggtgcacctgactcctgcggagaagtct

SEQ ID NO: 21487 - DNA, 123 bp, synthetic construct
  source 1..123: mol_type = other DNA
gtaacggcagacttctccacgttttagagctagaaatagcaagttaaaataaggctagtccgttatcaacttgaaaaagtggcaccgagtcggtgcggtgcacctgactcctgcggagaagtc

SEQ ID NO: 21488 - DNA, 131 bp, synthetic construct
  source 1..131: mol_type = other DNA
gtaacggcagacttctccacgttttagagctagaaatagcaagttaaaataaggctagtccgttatcaacttgaaaaagtggcaccgagtcggtgcgtgcacctgactcctgcggagaagtctgccgttac

SEQ ID NO: 21489 - DNA, 130 bp, synthetic construct
  source 1..130: mol_type = other DNA
gtaacggcagacttctccacgttttagagctagaaatagcaagttaaaataaggctagtccgttatcaacttgaaaaagtggcaccgagtcggtgcgtgcacctgactcctgcggagaagtctgccgtta

SEQ ID NO: 21490 - DNA, 129 bp, synthetic construct
  source 1..129: mol_type = other DNA
gtaacggcagacttctccacgttttagagctagaaatagcaagttaaaataaggctagtccgttatcaacttgaaaaagtggcaccgagtcggtgcgtgcacctgactcctgcggagaagtctgccgtt

SEQ ID NO: 21491 - DNA, 128 bp, synthetic construct
  source 1..128: mol_type = other DNA
gtaacggcagacttctccacgttttagagctagaaatagcaagttaaaataaggctagtccgttatcaacttgaaaaagtggcaccgagtcggtgcgtgcacctgactcctgcggagaagtctgccgt

SEQ ID NO: 21492 - DNA, 127 bp, synthetic construct
  source 1..127: mol_type = other DNA
gtaacggcagacttctccacgttttagagctagaaatagcaagttaaaataaggctagtccgttatcaacttgaaaaagtggcaccgagtcggtgcgtgcacctgactcctgcggagaagtctgccg

SEQ ID NO: 21493 - DNA, 126 bp, synthetic construct
  source 1..126: mol_type = other DNA
gtaacggcagacttctccacgttttagagctagaaatagcaagttaaaataaggctagtccgttatcaacttgaaaaagtggcaccgagtcggtgcgtgcacctgactcctgcggagaagtctgcc

SEQ ID NO: 21494 - DNA, 125 bp, synthetic construct
  source 1..125: mol_type = other DNA
gtaacggcagacttctccacgttttagagctagaaatagcaagttaaaataaggctagtccgttatcaacttgaaaaagtggcaccgagtcggtgcgtgcacctgactcctgcggagaagtctgc

SEQ ID NO: 21495 - DNA, 124 bp, synthetic construct
  source 1..124: mol_type = other DNA
gtaacggcagacttctccacgttttagagctagaaatagcaagttaaaataaggctagtccgttatcaacttgaaaaagtggcaccgagtcggtgcgtgcacctgactcctgcggagaagtctg

SEQ ID NO: 21496 - DNA, 123 bp, synthetic construct
  source 1..123: mol_type = other DNA
gtaacggcagacttctccacgttttagagctagaaatagcaagttaaaataaggctagtccgttatcaacttgaaaaagtggcaccgagtcggtgcgtgcacctgactcctgcggagaagtct

SEQ ID NO: 21497 - DNA, 122 bp, synthetic construct
  source 1..122: mol_type = other DNA
gtaacggcagacttctccacgttttagagctagaaatagcaagttaaaataaggctagtccgttatcaacttgaaaaagtggcaccgagtcggtgcgtgcacctgactcctgcggagaagtc

SEQ ID NO: 21498 - DNA, 130 bp, synthetic construct
  source 1..130: mol_type = other DNA
gtaacggcagacttctccacgttttagagctagaaatagcaagttaaaataaggctagtccgttatcaacttgaaaaagtggcaccgagtcggtgctgcacctgactcctgcggagaagtctgccgttac

SEQ ID NO: 21499 - DNA, 129 bp, synthetic construct
  source 1..129: mol_type = other DNA
gtaacggcagacttctccacgttttagagctagaaatagcaagttaaaataaggctagtccgttatcaacttgaaaaagtggcaccgagtcggtgctgcacctgactcctgcggagaagtctgccgtta

SEQ ID NO: 21500 - DNA, 128 bp, synthetic construct
  source 1..128: mol_type = other DNA
gtaacggcagacttctccacgttttagagctagaaatagcaagttaaaataaggctagtccgttatcaacttgaaaaagtggcaccgagtcggtgctgcacctgactcctgcggagaagtctgccgtt

SEQ ID NO: 21501 - DNA, 127 bp, synthetic construct
  source 1..127: mol_type = other DNA
gtaacggcagacttctccacgttttagagctagaaatagcaagttaaaataaggctagtccgttatcaacttgaaaaagtggcaccgagtcggtgctgcacctgactcctgcggagaagtctgccgt

SEQ ID NO: 21502 - DNA, 126 bp, synthetic construct
  source 1..126: mol_type = other DNA
gtaacggcagacttctccacgttttagagctagaaatagcaagttaaaataaggctagtccgttatcaacttgaaaaagtggcaccgagtcggtgctgcacctgactcctgcggagaagtctgccg

SEQ ID NO: 21503 - DNA, 125 bp, synthetic construct
  source 1..125: mol_type = other DNA
gtaacggcagacttctccacgttttagagctagaaatagcaagttaaaataaggctagtccgttatcaacttgaaaaagtggcaccgagtcggtgctgcacctgactcctgcggagaagtctgcc

SEQ ID NO: 21504 - DNA, 124 bp, synthetic construct
  source 1..124: mol_type = other DNA
gtaacggcagacttctccacgttttagagctagaaatagcaagttaaaataaggctagtccgttatcaacttgaaaaagtggcaccgagtcggtgctgcacctgactcctgcggagaagtctgc

SEQ ID NO: 21505 - DNA, 123 bp, synthetic construct
  source 1..123: mol_type = other DNA
gtaacggcagacttctccacgttttagagctagaaatagcaagttaaaataaggctagtccgttatcaacttgaaaaagtggcaccgagtcggtgctgcacctgactcctgcggagaagtctg

SEQ ID NO: 21506 - DNA, 122 bp, synthetic construct
  source 1..122: mol_type = other DNA
gtaacggcagacttctccacgttttagagctagaaatagcaagttaaaataaggctagtccgttatcaacttgaaaaagtggcaccgagtcggtgctgcacctgactcctgcggagaagtct

SEQ ID NO: 21507 - DNA, 121 bp, synthetic construct
  source 1..121: mol_type = other DNA
gtaacggcagacttctccacgttttagagctagaaatagcaagttaaaataaggctagtccgttatcaacttgaaaaagtggcaccgagtcggtgctgcacctgactcctgcggagaagtc

SEQ ID NO: 21508 - DNA, 129 bp, synthetic construct
  source 1..129: mol_type = other DNA
gtaacggcagacttctccacgttttagagctagaaatagcaagttaaaataaggctagtccgttatcaacttgaaaaagtggcaccgagtcggtgcgcacctgactcctgcggagaagtctgccgttac

SEQ ID NO: 21509 - DNA, 128 bp, synthetic construct
  source 1..128: mol_type = other DNA
gtaacggcagacttctccacgttttagagctagaaatagcaagttaaaataaggctagtccgttatcaacttgaaaaagtggcaccgagtcggtgcgcacctgactcctgcggagaagtctgccgtta

SEQ ID NO: 21510 - DNA, 127 bp, synthetic construct
  source 1..127: mol_type = other DNA
gtaacggcagacttctccacgttttagagctagaaatagcaagttaaaataaggctagtccgttatcaacttgaaaaagtggcaccgagtcggtgcgcacctgactcctgcggagaagtctgccgtt

SEQ ID NO: 21511 - DNA, 126 bp, synthetic construct
  source 1..126: mol_type = other DNA
gtaacggcagacttctccacgttttagagctagaaatagcaagttaaaataaggctagtccgttatcaacttgaaaaagtggcaccgagtcggtgcgcacctgactcctgcggagaagtctgccgt

SEQ ID NO: 21512 - DNA, 125 bp, synthetic construct
  source 1..125: mol_type = other DNA
gtaacggcagacttctccacgttttagagctagaaatagcaagttaaaataaggctagtccgttatcaacttgaaaaagtggcaccgagtcggtgcgcacctgactcctgcggagaagtctgccg

SEQ ID NO: 21513 - DNA, 124 bp, synthetic construct
  source 1..124: mol_type = other DNA
gtaacggcagacttctccacgttttagagctagaaatagcaagttaaaataaggctagtccgttatcaacttgaaaaagtggcaccgagtcggtgcgcacctgactcctgcggagaagtctgcc

SEQ ID NO: 21514 - DNA, 123 bp, synthetic construct
  source 1..123: mol_type = other DNA
gtaacggcagacttctccacgttttagagctagaaatagcaagttaaaataaggctagtccgttatcaacttgaaaaagtggcaccgagtcggtgcgcacctgactcctgcggagaagtctgc

SEQ ID NO: 21515 - DNA, 122 bp, synthetic construct
  source 1..122: mol_type = other DNA
gtaacggcagacttctccacgttttagagctagaaatagcaagttaaaataaggctagtccgttatcaacttgaaaaagtggcaccgagtcggtgcgcacctgactcctgcggagaagtctg

SEQ ID NO: 21516 - DNA, 121 bp, synthetic construct
  source 1..121: mol_type = other DNA
gtaacggcagacttctccacgttttagagctagaaatagcaagttaaaataaggctagtccgttatcaacttgaaaaagtggcaccgagtcggtgcgcacctgactcctgcggagaagtct

SEQ ID NO: 21517 - DNA, 120 bp, synthetic construct
  source 1..120: mol_type = other DNA
gtaacggcagacttctccacgttttagagctagaaatagcaagttaaaataaggctagtccgttatcaacttgaaaaagtggcaccgagtcggtgcgcacctgactcctgcggagaagtc

SEQ ID NO: 21518 - DNA, 128 bp, synthetic construct
  source 1..128: mol_type = other DNA
gtaacggcagacttctccacgttttagagctagaaatagcaagttaaaataaggctagtccgttatcaacttgaaaaagtggcaccgagtcggtgccacctgactcctgcggagaagtctgccgttac

SEQ ID NO: 21519 - DNA, 127 bp, synthetic construct
  source 1..127: mol_type = other DNA
gtaacggcagacttctccacgttttagagctagaaatagcaagttaaaataaggctagtccgttatcaacttgaaaaagtggcaccgagtcggtgccacctgactcctgcggagaagtctgccgtta

SEQ ID NO: 21520 - DNA, 126 bp, synthetic construct
  source 1..126: mol_type = other DNA
gtaacggcagacttctccacgttttagagctagaaatagcaagttaaaataaggctagtccgttatcaacttgaaaaagtggcaccgagtcggtgccacctgactcctgcggagaagtctgccgtt

SEQ ID NO: 21521 - DNA, 125 bp, synthetic construct
  source 1..125: mol_type = other DNA
gtaacggcagacttctccacgttttagagctagaaatagcaagttaaaataaggctagtccgttatcaacttgaaaaagtggcaccgagtcggtgccacctgactcctgcggagaagtctgccgt

SEQ ID NO: 21522 - DNA, 124 bp, synthetic construct
  source 1..124: mol_type = other DNA
gtaacggcagacttctccacgttttagagctagaaatagcaagttaaaataaggctagtccgttatcaacttgaaaaagtggcaccgagtcggtgccacctgactcctgcggagaagtctgccg

SEQ ID NO: 21523 - DNA, 123 bp, synthetic construct
  source 1..123: mol_type = other DNA
gtaacggcagacttctccacgttttagagctagaaatagcaagttaaaataaggctagtccgttatcaacttgaaaaagtggcaccgagtcggtgccacctgactcctgcggagaagtctgcc

SEQ ID NO: 21524 - DNA, 122 bp, synthetic construct
  source 1..122: mol_type = other DNA
gtaacggcagacttctccacgttttagagctagaaatagcaagttaaaataaggctagtccgttatcaacttgaaaaagtggcaccgagtcggtgccacctgactcctgcggagaagtctgc

SEQ ID NO: 21525 - DNA, 121 bp, synthetic construct
  source 1..121: mol_type = other DNA
gtaacggcagacttctccacgttttagagctagaaatagcaagttaaaataaggctagtccgttatcaacttgaaaaagtggcaccgagtcggtgccacctgactcctgcggagaagtctg

SEQ ID NO: 21526 - DNA, 120 bp, synthetic construct
  source 1..120: mol_type = other DNA
gtaacggcagacttctccacgttttagagctagaaatagcaagttaaaataaggctagtccgttatcaacttgaaaaagtggcaccgagtcggtgccacctgactcctgcggagaagtct

SEQ ID NO: 21527 - DNA, 119 bp, synthetic construct
  source 1..119: mol_type = other DNA
gtaacggcagacttctccacgttttagagctagaaatagcaagttaaaataaggctagtccgttatcaacttgaaaaagtggcaccgagtcggtgccacctgactcctgcggagaagtc

SEQ ID NO: 21528 - DNA, 127 bp, synthetic construct
  source 1..127: mol_type = other DNA
gtaacggcagacttctccacgttttagagctagaaatagcaagttaaaataaggctagtccgttatcaacttgaaaaagtggcaccgagtcggtgcacctgactcctgcggagaagtctgccgttac

SEQ ID NO: 21529 - DNA, 126 bp, synthetic construct
  source 1..126: mol_type = other DNA
gtaacggcagacttctccacgttttagagctagaaatagcaagttaaaataaggctagtccgttatcaacttgaaaaagtggcaccgagtcggtgcacctgactcctgcggagaagtctgccgtta

SEQ ID NO: 21530 - DNA, 125 bp, synthetic construct
  source 1..125: mol_type = other DNA
gtaacggcagacttctccacgttttagagctagaaatagcaagttaaaataaggctagtccgttatcaacttgaaaaagtggcaccgagtcggtgcacctgactcctgcggagaagtctgccgtt

SEQ ID NO: 21531 - DNA, 124 bp, synthetic construct
  source 1..124: mol_type = other DNA
gtaacggcagacttctccacgttttagagctagaaatagcaagttaaaataaggctagtccgttatcaacttgaaaaagtggcaccgagtcggtgcacctgactcctgcggagaagtctgccgt

SEQ ID NO: 21532 - DNA, 123 bp, synthetic construct
  source 1..123: mol_type = other DNA
gtaacggcagacttctccacgttttagagctagaaatagcaagttaaaataaggctagtccgttatcaacttgaaaaagtggcaccgagtcggtgcacctgactcctgcggagaagtctgccg

SEQ ID NO: 21533 - DNA, 122 bp, synthetic construct
  source 1..122: mol_type = other DNA
gtaacggcagacttctccacgttttagagctagaaatagcaagttaaaataaggctagtccgttatcaacttgaaaaagtggcaccgagtcggtgcacctgactcctgcggagaagtctgcc

SEQ ID NO: 21534 - DNA, 121 bp, synthetic construct
  source 1..121: mol_type = other DNA
gtaacggcagacttctccacgttttagagctagaaatagcaagttaaaataaggctagtccgttatcaacttgaaaaagtggcaccgagtcggtgcacctgactcctgcggagaagtctgc

SEQ ID NO: 21535 - DNA, 120 bp, synthetic construct
  source 1..120: mol_type = other DNA
gtaacggcagacttctccacgttttagagctagaaatagcaagttaaaataaggctagtccgttatcaacttgaaaaagtggcaccgagtcggtgcacctgactcctgcggagaagtctg

SEQ ID NO: 21536 - DNA, 119 bp, synthetic construct
  source 1..119: mol_type = other DNA
gtaacggcagacttctccacgttttagagctagaaatagcaagttaaaataaggctagtccgttatcaacttgaaaaagtggcaccgagtcggtgcacctgactcctgcggagaagtct

SEQ ID NO: 21537 - DNA, 118 bp, synthetic construct
  source 1..118: mol_type = other DNA
gtaacggcagacttctccacgttttagagctagaaatagcaagttaaaataaggctagtccgttatcaacttgaaaaagtggcaccgagtcggtgcacctgactcctgcggagaagtc

SEQ ID NO: 21538 - DNA, 126 bp, synthetic construct
  source 1..126: mol_type = other DNA
gtaacggcagacttctccacgttttagagctagaaatagcaagttaaaataaggctagtccgttatcaacttgaaaaagtggcaccgagtcggtgccctgactcctgcggagaagtctgccgttac

SEQ ID NO: 21539 - DNA, 125 bp, synthetic construct
  source 1..125: mol_type = other DNA
gtaacggcagacttctccacgttttagagctagaaatagcaagttaaaataaggctagtccgttatcaacttgaaaaagtggcaccgagtcggtgccctgactcctgcggagaagtctgccgtta

SEQ ID NO: 21540 - DNA, 124 bp, synthetic construct
  source 1..124: mol_type = other DNA
gtaacggcagacttctccacgttttagagctagaaatagcaagttaaaataaggctagtccgttatcaacttgaaaaagtggcaccgagtcggtgccctgactcctgcggagaagtctgccgtt

SEQ ID NO: 21541 - DNA, 123 bp, synthetic construct
  source 1..123: mol_type = other DNA
gtaacggcagacttctccacgttttagagctagaaatagcaagttaaaataaggctagtccgttatcaacttgaaaaagtggcaccgagtcggtgccctgactcctgcggagaagtctgccgt

SEQ ID NO: 21542 - DNA, 122 bp, synthetic construct
  source 1..122: mol_type = other DNA
gtaacggcagacttctccacgttttagagctagaaatagcaagttaaaataaggctagtccgttatcaacttgaaaaagtggcaccgagtcggtgccctgactcctgcggagaagtctgccg

SEQ ID NO: 21543 - DNA, 121 bp, synthetic construct
  source 1..121: mol_type = other DNA
gtaacggcagacttctccacgttttagagctagaaatagcaagttaaaataaggctagtccgttatcaacttgaaaaagtggcaccgagtcggtgccctgactcctgcggagaagtctgcc

SEQ ID NO: 21544 - DNA, 120 bp, synthetic construct
  source 1..120: mol_type = other DNA
gtaacggcagacttctccacgttttagagctagaaatagcaagttaaaataaggctagtccgttatcaacttgaaaaagtggcaccgagtcggtgccctgactcctgcggagaagtctgc

SEQ ID NO: 21545 - DNA, 119 bp, synthetic construct
  source 1..119: mol_type = other DNA
gtaacggcagacttctccacgttttagagctagaaatagcaagttaaaataaggctagtccgttatcaacttgaaaaagtggcaccgagtcggtgccctgactcctgcggagaagtctg

SEQ ID NO: 21546 - DNA, 118 bp, synthetic construct
  source 1..118: mol_type = other DNA
gtaacggcagacttctccacgttttagagctagaaatagcaagttaaaataaggctagtccgttatcaacttgaaaaagtggcaccgagtcggtgccctgactcctgcggagaagtct

SEQ ID NO: 21547 - DNA, 117 bp, synthetic construct
  source 1..117: mol_type = other DNA
gtaacggcagacttctccacgttttagagctagaaatagcaagttaaaataaggctagtccgttatcaacttgaaaaagtggcaccgagtcggtgccctgactcctgcggagaagtc

SEQ ID NO: 21548 - DNA, 125 bp, synthetic construct
  source 1..125: mol_type = other DNA
gtaacggcagacttctccacgttttagagctagaaatagcaagttaaaataaggctagtccgttatcaacttgaaaaagtggcaccgagtcggtgcctgactcctgcggagaagtctgccgttac

SEQ ID NO: 21549 - DNA, 124 bp, synthetic construct
  source 1..124: mol_type = other DNA
gtaacggcagacttctccacgttttagagctagaaatagcaagttaaaataaggctagtccgttatcaacttgaaaaagtggcaccgagtcggtgcctgactcctgcggagaagtctgccgtta

SEQ ID NO: 21550 - DNA, 123 bp, synthetic construct
  source 1..123: mol_type = other DNA
gtaacggcagacttctccacgttttagagctagaaatagcaagttaaaataaggctagtccgttatcaacttgaaaaagtggcaccgagtcggtgcctgactcctgcggagaagtctgccgtt

SEQ ID NO: 21551 - DNA, 122 bp, synthetic construct
  source 1..122: mol_type = other DNA
gtaacggcagacttctccacgttttagagctagaaatagcaagttaaaataaggctagtccgttatcaacttgaaaaagtggcaccgagtcggtgcctgactcctgcggagaagtctgccgt

SEQ ID NO: 21552 - DNA, 121 bp, synthetic construct
  source 1..121: mol_type = other DNA
gtaacggcagacttctccacgttttagagctagaaatagcaagttaaaataaggctagtccgttatcaacttgaaaaagtggcaccgagtcggtgcctgactcctgcggagaagtctgccg

SEQ ID NO: 21553 - DNA, 120 bp, synthetic construct
  source 1..120: mol_type = other DNA
gtaacggcagacttctccacgttttagagctagaaatagcaagttaaaataaggctagtccgttatcaacttgaaaaagtggcaccgagtcggtgcctgactcctgcggagaagtctgcc

SEQ ID NO: 21554 - DNA, 119 bp, synthetic construct
  source 1..119: mol_type = other DNA
gtaacggcagacttctccacgttttagagctagaaatagcaagttaaaataaggctagtccgttatcaacttgaaaaagtggcaccgagtcggtgcctgactcctgcggagaagtctgc

SEQ ID NO: 21555 - DNA, 118 bp, synthetic construct
  source 1..118: mol_type = other DNA
gtaacggcagacttctccacgttttagagctagaaatagcaagttaaaataaggctagtccgttatcaacttgaaaaagtggcaccgagtcggtgcctgactcctgcggagaagtctg

SEQ ID NO: 21556 - DNA, 117 bp, synthetic construct
  source 1..117: mol_type = other DNA
gtaacggcagacttctccacgttttagagctagaaatagcaagttaaaataaggctagtccgttatcaacttgaaaaagtggcaccgagtcggtgcctgactcctgcggagaagtct

SEQ ID NO: 21557 - DNA, 116 bp, synthetic construct
  source 1..116: mol_type = other DNA
gtaacggcagacttctccacgttttagagctagaaatagcaagttaaaataaggctagtccgttatcaacttgaaaaagtggcaccgagtcggtgcctgactcctgcggagaagtc

SEQ ID NO: 21558 - DNA, 124 bp, synthetic construct
  source 1..124: mol_type = other DNA
gtaacggcagacttctccacgttttagagctagaaatagcaagttaaaataaggctagtccgttatcaacttgaaaaagtggcaccgagtcggtgctgactcctgcggagaagtctgccgttac

SEQ ID NO: 21559 - DNA, 123 bp, synthetic construct
  source 1..123: mol_type = other DNA
gtaacggcagacttctccacgttttagagctagaaatagcaagttaaaataaggctagtccgttatcaacttgaaaaagtggcaccgagtcggtgctgactcctgcggagaagtctgccgtta

SEQ ID NO: 21560 - DNA, 122 bp, synthetic construct
  source 1..122: mol_type = other DNA
gtaacggcagacttctccacgttttagagctagaaatagcaagttaaaataaggctagtccgttatcaacttgaaaaagtggcaccgagtcggtgctgactcctgcggagaagtctgccgtt

SEQ ID NO: 21561 - DNA, 121 bp, synthetic construct
  source 1..121: mol_type = other DNA
gtaacggcagacttctccacgttttagagctagaaatagcaagttaaaataaggctagtccgttatcaacttgaaaaagtggcaccgagtcggtgctgactcctgcggagaagtctgccgt

SEQ ID NO: 21562 - DNA, 120 bp, synthetic construct
  source 1..120: mol_type = other DNA
gtaacggcagacttctccacgttttagagctagaaatagcaagttaaaataaggctagtccgttatcaacttgaaaaagtggcaccgagtcggtgctgactcctgcggagaagtctgccg

SEQ ID NO: 21563 - DNA, 119 bp, synthetic construct
  source 1..119: mol_type = other DNA
gtaacggcagacttctccacgttttagagctagaaatagcaagttaaaataaggctagtccgttatcaacttgaaaaagtggcaccgagtcggtgctgactcctgcggagaagtctgcc

SEQ ID NO: 21564 - DNA, 118 bp, synthetic construct
  source 1..118: mol_type = other DNA
gtaacggcagacttctccacgttttagagctagaaatagcaagttaaaataaggctagtccgttatcaacttgaaaaagtggcaccgagtcggtgctgactcctgcggagaagtctgc

SEQ ID NO: 21565 - DNA, 117 bp, synthetic construct
  source 1..117: mol_type = other DNA
gtaacggcagacttctccacgttttagagctagaaatagcaagttaaaataaggctagtccgttatcaacttgaaaaagtggcaccgagtcggtgctgactcctgcggagaagtctg

SEQ ID NO: 21566 - DNA, 116 bp, synthetic construct
  source 1..116: mol_type = other DNA
gtaacggcagacttctccacgttttagagctagaaatagcaagttaaaataaggctagtccgttatcaacttgaaaaagtggcaccgagtcggtgctgactcctgcggagaagtct

SEQ ID NO: 21567 - DNA, 115 bp, synthetic construct
  source 1..115: mol_type = other DNA
gtaacggcagacttctccacgttttagagctagaaatagcaagttaaaataaggctagtccgttatcaacttgaaaaagtggcaccgagtcggtgctgactcctgcggagaagtc

SEQ ID NO: 21568 - DNA, 123 bp, synthetic construct
  source 1..123: mol_type = other DNA
gtaacggcagacttctccacgttttagagctagaaatagcaagttaaaataaggctagtccgttatcaacttgaaaaagtggcaccgagtcggtgcgactcctgcggagaagtctgccgttac

SEQ ID NO: 21569 - DNA, 122 bp, synthetic construct
  source 1..122: mol_type = other DNA
gtaacggcagacttctccacgttttagagctagaaatagcaagttaaaataaggctagtccgttatcaacttgaaaaagtggcaccgagtcggtgcgactcctgcggagaagtctgccgtta

SEQ ID NO: 21570 - DNA, 121 bp, synthetic construct
  source 1..121: mol_type = other DNA
gtaacggcagacttctccacgttttagagctagaaatagcaagttaaaataaggctagtccgttatcaacttgaaaaagtggcaccgagtcggtgcgactcctgcggagaagtctgccgtt

SEQ ID NO: 21571 - DNA, 120 bp, synthetic construct
  source 1..120: mol_type = other DNA
gtaacggcagacttctccacgttttagagctagaaatagcaagttaaaataaggctagtccgttatcaacttgaaaaagtggcaccgagtcggtgcgactcctgcggagaagtctgccgt

SEQ ID NO: 21572 - DNA, 119 bp, synthetic construct
  source 1..119: mol_type = other DNA
gtaacggcagacttctccacgttttagagctagaaatagcaagttaaaataaggctagtccgttatcaacttgaaaaagtggcaccgagtcggtgcgactcctgcggagaagtctgccg

SEQ ID NO: 21573 - DNA, 118 bp, synthetic construct
  source 1..118: mol_type = other DNA
gtaacggcagacttctccacgttttagagctagaaatagcaagttaaaataaggctagtccgttatcaacttgaaaaagtggcaccgagtcggtgcgactcctgcggagaagtctgcc

SEQ ID NO: 21574 - DNA, 117 bp, synthetic construct
  source 1..117: mol_type = other DNA
gtaacggcagacttctccacgttttagagctagaaatagcaagttaaaataaggctagtccgttatcaacttgaaaaagtggcaccgagtcggtgcgactcctgcggagaagtctgc

SEQ ID NO: 21575 - DNA, 116 bp, synthetic construct
  source 1..116: mol_type = other DNA
gtaacggcagacttctccacgttttagagctagaaatagcaagttaaaataaggctagtccgttatcaacttgaaaaagtggcaccgagtcggtgcgactcctgcggagaagtctg

SEQ ID NO: 21576 - DNA, 115 bp, synthetic construct
  source 1..115: mol_type = other DNA
gtaacggcagacttctccacgttttagagctagaaatagcaagttaaaataaggctagtccgttatcaacttgaaaaagtggcaccgagtcggtgcgactcctgcggagaagtct

SEQ ID NO: 21577 - DNA, 114 bp, synthetic construct
  source 1..114: mol_type = other DNA
gtaacggcagacttctccacgttttagagctagaaatagcaagttaaaataaggctagtccgttatcaacttgaaaaagtggcaccgagtcggtgcgactcctgcggagaagtc

SEQ ID NO: 21578 - DNA, 122 bp, synthetic construct
  source 1..122: mol_type = other DNA
gtaacggcagacttctccacgttttagagctagaaatagcaagttaaaataaggctagtccgttatcaacttgaaaaagtggcaccgagtcggtgcactcctgcggagaagtctgccgttac

SEQ ID NO: 21579 - DNA, 121 bp, synthetic construct
  source 1..121: mol_type = other DNA
gtaacggcagacttctccacgttttagagctagaaatagcaagttaaaataaggctagtccgttatcaacttgaaaaagtggcaccgagtcggtgcactcctgcggagaagtctgccgtta

SEQ ID NO: 21580 - DNA, 120 bp, synthetic construct
  source 1..120: mol_type = other DNA
gtaacggcagacttctccacgttttagagctagaaatagcaagttaaaataaggctagtccgttatcaacttgaaaaagtggcaccgagtcggtgcactcctgcggagaagtctgccgtt

SEQ ID NO: 21581 - DNA, 119 bp, synthetic construct
  source 1..119: mol_type = other DNA
gtaacggcagacttctccacgttttagagctagaaatagcaagttaaaataaggctagtccgttatcaacttgaaaaagtggcaccgagtcggtgcactcctgcggagaagtctgccgt

SEQ ID NO: 21582 - DNA, 118 bp, synthetic construct
  source 1..118: mol_type = other DNA
gtaacggcagacttctccacgttttagagctagaaatagcaagttaaaataaggctagtccgttatcaacttgaaaaagtggcaccgagtcggtgcactcctgcggagaagtctgccg

SEQ ID NO: 21583 - DNA, 117 bp, synthetic construct
  source 1..117: mol_type = other DNA
gtaacggcagacttctccacgttttagagctagaaatagcaagttaaaataaggctagtccgttatcaacttgaaaaagtggcaccgagtcggtgcactcctgcggagaagtctgcc

SEQ ID NO: 21584 - DNA, 116 bp, synthetic construct
  source 1..116: mol_type = other DNA
gtaacggcagacttctccacgttttagagctagaaatagcaagttaaaataaggctagtccgttatcaacttgaaaaagtggcaccgagtcggtgcactcctgcggagaagtctgc

SEQ ID NO: 21585 - DNA, 115 bp, synthetic construct
  source 1..115: mol_type = other DNA
gtaacggcagacttctccacgttttagagctagaaatagcaagttaaaataaggctagtccgttatcaacttgaaaaagtggcaccgagtcggtgcactcctgcggagaagtctg

SEQ ID NO: 21586 - DNA, 114 bp, synthetic construct
  source 1..114: mol_type = other DNA
gtaacggcagacttctccacgttttagagctagaaatagcaagttaaaataaggctagtccgttatcaacttgaaaaagtggcaccgagtcggtgcactcctgcggagaagtct

SEQ ID NO: 21587 - DNA, 113 bp, synthetic construct
  source 1..113: mol_type = other DNA
gtaacggcagacttctccacgttttagagctagaaatagcaagttaaaataaggctagtccgttatcaacttgaaaaagtggcaccgagtcggtgcactcctgcggagaagtc

SEQ ID NO: 21588 - DNA, 121 bp, synthetic construct
  source 1..121: mol_type = other DNA
gtaacggcagacttctccacgttttagagctagaaatagcaagttaaaataaggctagtccgttatcaacttgaaaaagtggcaccgagtcggtgcctcctgcggagaagtctgccgttac

SEQ ID NO: 21589 - DNA, 120 bp, synthetic construct
  source 1..120: mol_type = other DNA
gtaacggcagacttctccacgttttagagctagaaatagcaagttaaaataaggctagtccgttatcaacttgaaaaagtggcaccgagtcggtgcctcctgcggagaagtctgccgtta

SEQ ID NO: 21590 - DNA, 119 bp, synthetic construct
  source 1..119: mol_type = other DNA
gtaacggcagacttctccacgttttagagctagaaatagcaagttaaaataaggctagtccgttatcaacttgaaaaagtggcaccgagtcggtgcctcctgcggagaagtctgccgtt

SEQ ID NO: 21591 - DNA, 118 bp, synthetic construct
  source 1..118: mol_type = other DNA
gtaacggcagacttctccacgttttagagctagaaatagcaagttaaaataaggctagtccgttatcaacttgaaaaagtggcaccgagtcggtgcctcctgcggagaagtctgccgt

SEQ ID NO: 21592 - DNA, 117 bp, synthetic construct
  source 1..117: mol_type = other DNA
gtaacggcagacttctccacgttttagagctagaaatagcaagttaaaataaggctagtccgttatcaacttgaaaaagtggcaccgagtcggtgcctcctgcggagaagtctgccg

SEQ ID NO: 21593 - DNA, 116 bp, synthetic construct
  source 1..116: mol_type = other DNA
gtaacggcagacttctccacgttttagagctagaaatagcaagttaaaataaggctagtccgttatcaacttgaaaaagtggcaccgagtcggtgcctcctgcggagaagtctgcc

SEQ ID NO: 21594 - DNA, 115 bp, synthetic construct
  source 1..115: mol_type = other DNA
gtaacggcagacttctccacgttttagagctagaaatagcaagttaaaataaggctagtccgttatcaacttgaaaaagtggcaccgagtcggtgcctcctgcggagaagtctgc

SEQ ID NO: 21595 - DNA, 114 bp, synthetic construct
  source 1..114: mol_type = other DNA
gtaacggcagacttctccacgttttagagctagaaatagcaagttaaaataaggctagtccgttatcaacttgaaaaagtggcaccgagtcggtgcctcctgcggagaagtctg

SEQ ID NO: 21596 - DNA, 113 bp, synthetic construct
  source 1..113: mol_type = other DNA
gtaacggcagacttctccacgttttagagctagaaatagcaagttaaaataaggctagtccgttatcaacttgaaaaagtggcaccgagtcggtgcctcctgcggagaagtct

SEQ ID NO: 21597 - DNA, 112 bp, synthetic construct
  source 1..112: mol_type = other DNA
gtaacggcagacttctccacgttttagagctagaaatagcaagttaaaataaggctagtccgttatcaacttgaaaaagtggcaccgagtcggtgcctcctgcggagaagtc

SEQ ID NO: 21598 - DNA, 20 bp, synthetic construct
  source 1..20: mol_type = other DNA
gggtgtggctccacagggtg

SEQ ID NO: 21599 - DNA, 20 bp, synthetic construct
  source 1..20: mol_type = other DNA
ccctagggtgtggctccaca

SEQ ID NO: 21600 - DNA, 20 bp, synthetic construct
  source 1..20: mol_type = other DNA
accctagggtgtggctccac

SEQ ID NO: 21601 - DNA, 20 bp, synthetic construct
  source 1..20: mol_type = other DNA
gattggccaaccctagggtg

SEQ ID NO: 21602 - DNA, 20 bp, synthetic construct
  source 1..20: mol_type = other DNA
gagtagattggccaacccta

SEQ ID NO: 21603 - DNA, 20 bp, synthetic construct
  source 1..20: mol_type = other DNA
ggagtagattggccaaccct

SEQ ID NO: 21604 - DNA, 20 bp, synthetic construct
  source 1..20: mol_type = other DNA
ccctgctcctgggagtagat

SEQ ID NO: 21605 - DNA, 20 bp, synthetic construct
  source 1..20: mol_type = other DNA
ctcctgccctccctgctcct

SEQ ID NO: 21606 - DNA, 20 bp, synthetic construct
  source 1..20: mol_type = other DNA
gctcctgccctccctgctcc

SEQ ID NO: 21607 - DNA, 20 bp, synthetic construct
  source 1..20: mol_type = other DNA
ctgacttttatgcccagccc

SEQ ID NO: 21608 - DNA, 20 bp, synthetic construct
  source 1..20: mol_type = other DNA
aagcaaatgtaagcaataga

SEQ ID NO: 21609 - DNA, 20 bp, synthetic construct
  source 1..20: mol_type = other DNA
tgcaccatggtgtctgtttg

SEQ ID NO: 21610 - DNA, 20 bp, synthetic construct
  source 1..20: mol_type = other DNA
ctcaggagtcagatgcacca

SEQ ID NO: 21611 - DNA, 20 bp, synthetic construct
  source 1..20: mol_type = other DNA
cagacttctcctcaggagtc

SEQ ID NO: 21612 - DNA, 20 bp, synthetic construct
  source 1..20: mol_type = other DNA
cagacttctctgcaggagtc

SEQ ID NO: 21613 - DNA, 20 bp, synthetic construct
  source 1..20: mol_type = other DNA
cagacttctctgccggagtc

SEQ ID NO: 21614 - DNA, 20 bp, synthetic construct
  source 1..20: mol_type = other DNA
cagacttctcttccggagtc

SEQ ID NO: 21615 - DNA, 20 bp, synthetic construct
  source 1..20: mol_type = other DNA
cagacttctcgtccggagtc

SEQ ID NO: 21616 - DNA, 20 bp, synthetic construct
  source 1..20: mol_type = other DNA
cagacttctcatccggagtc

SEQ ID NO: 21617 - DNA, 20 bp, synthetic construct
  source 1..20: mol_type = other DNA
gtaacggcagacttctcctc

SEQ ID NO: 21618 - DNA, 20 bp, synthetic construct
  source 1..20: mol_type = other DNA
gtaacggcagacttctctgc

SEQ ID NO: 21619 - DNA, 20 bp, synthetic construct
  source 1..20: mol_type = other DNA
gtaacggcagacttctcttc

SEQ ID NO: 21620 - DNA, 20 bp, synthetic construct
  source 1..20: mol_type = other DNA
gtaacggcagacttctcgtc

SEQ ID NO: 21621 - DNA, 20 bp, synthetic construct
  source 1..20: mol_type = other DNA
gtaacggcagacttctcatc

SEQ ID NO: 21622 - DNA, 20 bp, synthetic construct
  source 1..20: mol_type = other DNA
cttgccccacagggcagtaa

SEQ ID NO: 21623 - DNA, 20 bp, synthetic construct
  source 1..20: mol_type = other DNA
cacgttcaccttgccccaca

SEQ ID NO: 21624 - DNA, 20 bp, synthetic construct
  source 1..20: mol_type = other DNA
ccacgttcaccttgccccac

SEQ ID NO: 21625 - DNA, 20 bp, synthetic construct
  source 1..20: mol_type = other DNA
ccttgataccaacctgccca

SEQ ID NO: 21626 - DNA, 20 bp, synthetic construct
  source 1..20: mol_type = other DNA
accttgataccaacctgccc

SEQ ID NO: 21627 - DNA, 20 bp, synthetic construct
  source 1..20: mol_type = other DNA
tccacatgcccagtttctat

SEQ ID NO: 21628 - DNA, 20 bp, synthetic construct
  source 1..20: mol_type = other DNA
atcacttagacctcaccctg

SEQ ID NO: 21629 - DNA, 20 bp, synthetic construct
  source 1..20: mol_type = other DNA
accctgtggagccacaccct

SEQ ID NO: 21630 - DNA, 20 bp, synthetic construct
  source 1..20: mol_type = other DNA
ccctgtggagccacacccta

SEQ ID NO: 21631 - DNA, 20 bp, synthetic construct
  source 1..20: mol_type = other DNA
gtggagccacaccctagggt

SEQ ID NO: 21632 - DNA, 20 bp, synthetic construct
  source 1..20: mol_type = other DNA
gggttggccaatctactccc

SEQ ID NO: 21633 - DNA, 20 bp, synthetic construct
  source 1..20: mol_type = other DNA
gccaatctactcccaggagc

SEQ ID NO: 21634 - DNA, 20 bp, synthetic construct
  source 1..20: mol_type = other DNA
ccaatctactcccaggagca

SEQ ID NO: 21635 - DNA, 20 bp, synthetic construct
  source 1..20: mol_type = other DNA
atctactcccaggagcaggg

SEQ ID NO: 21636 - DNA, 20 bp, synthetic construct
  source 1..20: mol_type = other DNA
tctactcccaggagcaggga

SEQ ID NO: 21637 - DNA, 20 bp, synthetic construct
  source 1..20: mol_type = other DNA
ctcccaggagcagggagggc

SEQ ID NO: 21638 - DNA, 20 bp, synthetic construct
  source 1..20: mol_type = other DNA
gagcagggagggcaggagcc

SEQ ID NO: 21639 - DNA, 20 bp, synthetic construct
  source 1..20: mol_type = other DNA
agcagggagggcaggagcca

SEQ ID NO: 21640 - DNA, 20 bp, synthetic construct
  source 1..20: mol_type = other DNA
gggagggcaggagccagggc

SEQ ID NO: 21641 - DNA, 20 bp, synthetic construct
  source 1..20: mol_type = other DNA
ggagggcaggagccagggct

SEQ ID NO: 21642 - DNA, 20 bp, synthetic construct
  source 1..20: mol_type = other DNA
cagggctgggcataaaagtc

SEQ ID NO: 21643 - DNA, 20 bp, synthetic construct
  source 1..20: mol_type = other DNA
agggctgggcataaaagtca

SEQ ID NO: 21644 - DNA, 20 bp, synthetic construct
  source 1..20: mol_type = other DNA
gcaacctcaaacagacacca

SEQ ID NO: 21645 - DNA, 20 bp, synthetic construct
  source 1..20: mol_type = other DNA
catggtgcatctgactcctg

SEQ ID NO: 21646 - DNA, 20 bp, synthetic construct
  source 1..20: mol_type = other DNA
catggtgcacctgactcctg

SEQ ID NO: 21647 - DNA, 20 bp, synthetic construct
  source 1..20: mol_type = other DNA
agtctgccgttactgccctg

SEQ ID NO: 21648 - DNA, 20 bp, synthetic construct
  source 1..20: mol_type = other DNA
gtctgccgttactgccctgt

SEQ ID NO: 21649 - DNA, 20 bp, synthetic construct
  source 1..20: mol_type = other DNA
tctgccgttactgccctgtg

SEQ ID NO: 21650 - DNA, 20 bp, synthetic construct
  source 1..20: mol_type = other DNA
cgttactgccctgtggggca

SEQ ID NO: 21651 - DNA, 20 bp, synthetic construct
  source 1..20: mol_type = other DNA
cctgtggggcaaggtgaacg

SEQ ID NO: 21652 - DNA, 20 bp, synthetic construct
  source 1..20: mol_type = other DNA
aaggtgaacgtggatgaagt

SEQ ID NO: 21653 - DNA, 20 bp, synthetic construct
  source 1..20: mol_type = other DNA
gtgaacgtggatgaagttgg

SEQ ID NO: 21654 - DNA, 20 bp, synthetic construct
  source 1..20: mol_type = other DNA
cgtggatgaagttggtggtg

SEQ ID NO: 21655 - DNA, 20 bp, synthetic construct
  source 1..20: mol_type = other DNA
tgaagttggtggtgaggccc

SEQ ID NO: 21656 - DNA, 20 bp, synthetic construct
  source 1..20: mol_type = other DNA
gaagttggtggtgaggccct

SEQ ID NO: 21657 - DNA, 20 bp, synthetic construct
  source 1..20: mol_type = other DNA
ttggtggtgaggccctgggc

SEQ ID NO: 21658 - DNA, 20 bp, synthetic construct
  source 1..20: mol_type = other DNA
tggtgaggccctgggcaggt

SEQ ID NO: 21659 - DNA, 20 bp, synthetic construct
  source 1..20: mol_type = other DNA
ccctgggcaggttggtatca

SEQ ID NO: 21660 - DNA, 20 bp, synthetic construct
  source 1..20: mol_type = other DNA
tggtatcaaggttacaagac

SEQ ID NO: 21661 - DNA, 20 bp, synthetic construct
  source 1..20: mol_type = other DNA
aaggttacaagacaggttta

SEQ ID NO: 21662 - DNA, 20 bp, synthetic construct
  source 1..20: mol_type = other DNA
ttaaggagaccaatagaaac

SEQ ID NO: 21663 - DNA, 20 bp, synthetic construct
  source 1..20: mol_type = other DNA
taaggagaccaatagaaact

SEQ ID NO: 21664 - DNA, 20 bp, synthetic construct
  source 1..20: mol_type = other DNA
accaatagaaactgggcatg

SEQ ID NO: 21665 - DNA, 20 bp, synthetic construct
  source 1..20: mol_type = other DNA
gtggagacagagaagactct

SEQ ID NO: 21666 - DNA, 20 bp, synthetic construct
  source 1..20: mol_type = other DNA
tggagacagagaagactctt

SEQ ID NO: 21667 - DNA, 20 bp, synthetic construct
  source 1..20: mol_type = other DNA
aagactcttgggtttctgat

SEQ ID NO: 21668 - DNA, 20 bp, synthetic construct
  source 1..20: mol_type = other DNA
catggtgcatctgactcctg

SEQ ID NO: 21669 - DNA, 17 bp, synthetic construct
  source 1..17: mol_type = other DNA
gagtcagatgcaccatg

SEQ ID NO: 21670 - DNA, 20 bp, synthetic construct
  source 1..20: mol_type = other DNA
aacggcagacttctcgtcag

SEQ ID NO: 21671 - DNA, 20 bp, synthetic construct
  source 1..20: mol_type = other DNA
tggtgcatctgactcctgag

SEQ ID NO: 21672 - DNA, 20 bp, synthetic construct
  source 1..20: mol_type = other DNA
aacggcagacttctctacag

SEQ ID NO: 21673 - DNA, 20 bp, synthetic construct
  source 1..20: mol_type = other DNA
aacggcagacttctccacag

SEQ ID NO: 21674 - DNA, 20 bp, synthetic construct
  source 1..20: mol_type = other DNA
gtaacggcagacttctcctc

SEQ ID NO: 21675 - DNA, 20 bp, synthetic construct
  source 1..20: mol_type = other DNA
tggtgcatctgactcctgtg

SEQ ID NO: 21676 - DNA, 20 bp, synthetic construct
  source 1..20: mol_type = other DNA
tggtgcacctgactcctgtg

SEQ ID NO: 21677 - RNA, 133 nt, synthetic construct; identical to SEQ ID NO: 19701
  source 1..133: mol_type = other RNA

SEQ ID NO: 21678 - RNA, 132 nt, synthetic construct; identical to SEQ ID NO: 19702
  source 1..132: mol_type = other RNA

SEQ ID NO: 21679 - RNA, 131 nt, synthetic construct; identical to SEQ ID NO: 19703
  source 1..131: mol_type = other RNA

SEQ ID NO: 21680 - RNA, 130 nt, synthetic construct; identical to SEQ ID NO: 19704
  source 1..130: mol_type = other RNA

SEQ ID NO: 21681 - RNA, 129 nt, synthetic construct; identical to SEQ ID NO: 19705
  source 1..129: mol_type = other RNA

SEQ ID NO: 21682 - RNA, 128 nt, synthetic construct; identical to SEQ ID NO: 19706
  source 1..128: mol_type = other RNA

SEQ ID NO: 21683 - RNA, 127 nt, synthetic construct; identical to SEQ ID NO: 19707
  source 1..127: mol_type = other RNA

SEQ ID NO: 21684 - RNA, 126 nt, synthetic construct; identical to SEQ ID NO: 19708
  source 1..126: mol_type = other RNA

SEQ ID NO: 21685 - RNA, 125 nt, synthetic construct; identical to SEQ ID NO: 19709
  source 1..125: mol_type = other RNA

SEQ ID NO: 21686 - RNA, 124 nt, synthetic construct; identical to SEQ ID NO: 19710
  source 1..124: mol_type = other RNA

SEQ ID NO: 21687 - RNA, 132 nt, synthetic construct; identical to SEQ ID NO: 19711
  source 1..132: mol_type = other RNA

SEQ ID NO: 21688 - RNA, 131 nt, synthetic construct; identical to SEQ ID NO: 19712
  source 1..131: mol_type = other RNA

SEQ ID NO: 21689 - RNA, 130 nt, synthetic construct; identical to SEQ ID NO: 19713
  source 1..130: mol_type = other RNA

SEQ ID NO: 21690 - RNA, 129 nt, synthetic construct; identical to SEQ ID NO: 19714
  source 1..129: mol_type = other RNA

SEQ ID NO: 21691 - RNA, 128 nt, synthetic construct; identical to SEQ ID NO: 19715
  source 1..128: mol_type = other RNA

SEQ ID NO: 21692 - RNA, 127 nt, synthetic construct; identical to SEQ ID NO: 19716
  source 1..127: mol_type = other RNA

SEQ ID NO: 21693 - RNA, 126 nt, synthetic construct; identical to SEQ ID NO: 19717
  source 1..126: mol_type = other RNA

SEQ ID NO: 21694 - RNA, 125 nt, synthetic construct; identical to SEQ ID NO: 19718
  source 1..125: mol_type = other RNA

SEQ ID NO: 21695 - RNA, 124 nt, synthetic construct; identical to SEQ ID NO: 19719
  source 1..124: mol_type = other RNA

SEQ ID NO: 21696 - RNA, 123 nt, synthetic construct; identical to SEQ ID NO: 19720
  source 1..123: mol_type = other RNA

SEQ ID NO: 21697 - RNA, 130 nt, synthetic construct; identical to SEQ ID NO: 19721
  source 1..130: mol_type = other RNA

SEQ ID NO: 21698 - RNA, 129 nt, synthetic construct; identical to SEQ ID NO: 19722
  source 1..129: mol_type = other RNA

SEQ ID NO: 21699 - RNA, 128 nt, synthetic construct; identical to SEQ ID NO: 19723
  source 1..128: mol_type = other RNA

SEQ ID NO: 21700 - RNA, 127 nt, synthetic construct; identical to SEQ ID NO: 19724
  source 1..127: mol_type = other RNA

SEQ ID NO: 21701 - RNA, 126 nt, synthetic construct; identical to SEQ ID NO: 19725
  source 1..126: mol_type = other RNA

SEQ ID NO: 21702 - RNA, 125 nt, synthetic construct; identical to SEQ ID NO: 19726
  source 1..125: mol_type = other RNA

SEQ ID NO: 21703 - RNA, 124 nt, synthetic construct; identical to SEQ ID NO: 19727
  source 1..124: mol_type = other RNA

SEQ ID NO: 21704 - RNA, 123 nt, synthetic construct; identical to SEQ ID NO: 19728
  source 1..123: mol_type = other RNA

SEQ ID NO: 21705 - RNA, 122 nt, synthetic construct; identical to SEQ ID NO: 19729
  source 1..122: mol_type = other RNA

SEQ ID NO: 21706 - RNA, 121 nt, synthetic construct; identical to SEQ ID NO: 19730
  source 1..121: mol_type = other RNA

SEQ ID NO: 21707 - RNA, 129 nt, synthetic construct; identical to SEQ ID NO: 19731
  source 1..129: mol_type = other RNA

SEQ ID NO: 21708 - RNA, 128 nt, synthetic construct; identical to SEQ ID NO: 19732
  source 1..128: mol_type = other RNA

SEQ ID NO: 21709 - RNA, 127 nt, synthetic construct; identical to SEQ ID NO: 19733
  source 1..127: mol_type = other RNA

SEQ ID NO: 21710 - RNA, 126 nt, synthetic construct; identical to SEQ ID NO: 19734
  source 1..126: mol_type = other RNA

SEQ ID NO: 21711 - RNA, 125 nt, synthetic construct; identical to SEQ ID NO: 19735
  source 1..125: mol_type = other RNA

SEQ ID NO: 21712 - RNA, 124 nt, synthetic construct; identical to SEQ ID NO: 19736
  source 1..124: mol_type = other RNA

SEQ ID NO: 21713 - RNA, 123 nt, synthetic construct; identical to SEQ ID NO: 19737
  source 1..123: mol_type = other RNA

SEQ ID NO: 21714 - RNA, 122 nt, synthetic construct; identical to SEQ ID NO: 19738
  source 1..122: mol_type = other RNA

SEQ ID NO: 21715 - RNA, 121 nt, synthetic construct; identical to SEQ ID NO: 19739
  source 1..121: mol_type = other RNA

SEQ ID NO: 21716 - RNA, 120 nt, synthetic construct; identical to SEQ ID NO: 19740
  source 1..120: mol_type = other RNA

SEQ ID NO: 21717 - RNA, 127 nt, synthetic construct; identical to SEQ ID NO: 19741
  source 1..127: mol_type = other RNA

SEQ ID NO: 21718 - RNA, 126 nt, synthetic construct; identical to SEQ ID NO: 19742
  source 1..126: mol_type = other RNA

SEQ ID NO: 21719 - RNA, 125 nt, synthetic construct; identical to SEQ ID NO: 19743
  source 1..125: mol_type = other RNA

SEQ ID NO: 21720 - RNA, 124 nt, synthetic construct; identical to SEQ ID NO: 19744
  source 1..124: mol_type = other RNA

SEQ ID NO: 21721 - RNA, 123 nt, synthetic construct; identical to SEQ ID NO: 19745
  source 1..123: mol_type = other RNA

SEQ ID NO: 21722 - RNA, 122 nt, synthetic construct; identical to SEQ ID NO: 19746
  source 1..122: mol_type = other RNA

SEQ ID NO: 21723 - RNA, 121 nt, synthetic construct; identical to SEQ ID NO: 19747
  source 1..121: mol_type = other RNA

SEQ ID NO: 21724 - RNA, 120 nt, synthetic construct; identical to SEQ ID NO: 19748
  source 1..120: mol_type = other RNA

SEQ ID NO: 21725 - RNA, 119 nt, synthetic construct; identical to SEQ ID NO: 19749
  source 1..119: mol_type = other RNA

SEQ ID NO: 21726 - RNA, 118 nt, synthetic construct; identical to SEQ ID NO: 19750
  source 1..118: mol_type = other RNA

SEQ ID NO: 21727 - RNA, 126 nt, synthetic construct; identical to SEQ ID NO: 19751
  source 1..126: mol_type = other RNA

SEQ ID NO: 21728 - RNA, 125 nt, synthetic construct; identical to SEQ ID NO: 19752
  source 1..125: mol_type = other RNA

SEQ ID NO: 21729 - RNA, 124 nt, synthetic construct; identical to SEQ ID NO: 19753
  source 1..124: mol_type = other RNA

SEQ ID NO: 21730 - RNA, 123 nt, synthetic construct; identical to SEQ ID NO: 19754
  source 1..123: mol_type = other RNA

SEQ ID NO: 21731 - RNA, 122 nt, synthetic construct; identical to SEQ ID NO: 19755
  source 1..122: mol_type = other RNA

SEQ ID NO: 21732 - RNA, 121 nt, synthetic construct; identical to SEQ ID NO: 19756
  source 1..121: mol_type = other RNA

SEQ ID NO: 21733 - RNA, 120 nt, synthetic construct; identical to SEQ ID NO: 19757
  source 1..120: mol_type = other RNA

SEQ ID NO: 21734 - RNA, 119 nt, synthetic construct; identical to SEQ ID NO: 19758
  source 1..119: mol_type = other RNA

SEQ ID NO: 21735 - RNA, 118 nt, synthetic construct; identical to SEQ ID NO: 19759
  source 1..118: mol_type = other RNA

SEQ ID NO: 21736 - RNA, 117 nt, synthetic construct; identical to SEQ ID NO: 19760
  source 1..117: mol_type = other RNA

SEQ ID NO: 21737 - RNA, 125 nt, synthetic construct; identical to SEQ ID NO: 19761
  source 1..125: mol_type = other RNA

SEQ ID NO: 21738 - RNA, 124 nt, synthetic construct; identical to SEQ ID NO: 19762
  source 1..124: mol_type = other RNA

SEQ ID NO: 21739 - RNA, 123 nt, synthetic construct; identical to SEQ ID NO: 19763
  source 1..123: mol_type = other RNA

SEQ ID NO: 21740 - RNA, 122 nt, synthetic construct; identical to SEQ ID NO: 19764
  source 1..122: mol_type = other RNA

SEQ ID NO: 21741 - RNA, 121 nt, synthetic construct; identical to SEQ ID NO: 19765
  source 1..121: mol_type = other RNA

SEQ ID NO: 21742 - RNA, 120 nt, synthetic construct; identical to SEQ ID NO: 19766
  source 1..120: mol_type = other RNA

SEQ ID NO: 21743 - RNA, 119 nt, synthetic construct; identical to SEQ ID NO: 19767
  source 1..119: mol_type = other RNA

SEQ ID NO: 21744 - RNA, 118 nt, synthetic construct; identical to SEQ ID NO: 19768
  source 1..118: mol_type = other RNA

SEQ ID NO: 21745 - RNA, 117 nt, synthetic construct; identical to SEQ ID NO: 19769
  source 1..117: mol_type = other RNA

SEQ ID NO: 21746 - RNA, 116 nt, synthetic construct; identical to SEQ ID NO: 19770
  source 1..116: mol_type = other RNA

SEQ ID NO: 21747 - RNA, 123 nt, synthetic construct; identical to SEQ ID NO: 19771
  source 1..123: mol_type = other RNA

SEQ ID NO: 21748 - RNA, 122 nt, synthetic construct; identical to SEQ ID NO: 19772
  source 1..122: mol_type = other RNA

SEQ ID NO: 21749 - RNA, 121 nt, synthetic construct; identical to SEQ ID NO: 19773
  source 1..121: mol_type = other RNA

SEQ ID NO: 21750 - RNA, 120 nt, synthetic construct; identical to SEQ ID NO: 19774
  source 1..120: mol_type = other RNA

SEQ ID NO: 21751 - RNA, 119 nt, synthetic construct; identical to SEQ ID NO: 19775
  source 1..119: mol_type = other RNA

SEQ ID NO: 21752 - RNA, 118 nt, synthetic construct; identical to SEQ ID NO: 19776
  source 1..118: mol_type = other RNA

SEQ ID NO: 21753 - RNA, 117 nt, synthetic construct; identical to SEQ ID NO: 19777
  source 1..117: mol_type = other RNA

SEQ ID NO: 21754 - RNA, 116 nt, synthetic construct; identical to SEQ ID NO: 19778
  source 1..116: mol_type = other RNA

SEQ ID NO: 21755 - RNA, 115 nt, synthetic construct; identical to SEQ ID NO: 19779
  source 1..115: mol_type = other RNA

SEQ ID NO: 21756 - RNA, 114 nt, synthetic construct; identical to SEQ ID NO: 19780
  source 1..114: mol_type = other RNA

SEQ ID NO: 21757 - RNA, 122 nt, synthetic construct; identical to SEQ ID NO: 19781
  source 1..122: mol_type = other RNA

SEQ ID NO: 21758 - RNA, 121 nt, synthetic construct; identical to SEQ ID NO: 19782
  source 1..121: mol_type = other RNA

SEQ ID NO: 21759 - RNA, 120 nt, synthetic construct; identical to SEQ ID NO: 19783
  source 1..120: mol_type = other RNA

SEQ ID NO: 21760 - RNA, 119 nt, synthetic construct; identical to SEQ ID NO: 19784
  source 1..119: mol_type = other RNA

SEQ ID NO: 21761 - RNA, 118 nt, synthetic construct; identical to SEQ ID NO: 19785
  source 1..118: mol_type = other RNA

SEQ ID NO: 21762 - RNA, 117 nt, synthetic construct; identical to SEQ ID NO: 19786
  source 1..117: mol_type = other RNA

SEQ ID NO: 21763 - RNA, 116 nt, synthetic construct; identical to SEQ ID NO: 19787
  source 1..116: mol_type = other RNA

SEQ ID NO: 21764 - RNA, 115 nt, synthetic construct; identical to SEQ ID NO: 19788
  source 1..115: mol_type = other RNA

SEQ ID NO: 21765 - RNA, 114 nt, synthetic construct; identical to SEQ ID NO: 19789
  source 1..114: mol_type = other RNA

SEQ ID NO: 21766 - RNA, 113 nt, synthetic construct; identical to SEQ ID NO: 19790
  source 1..113: mol_type = other RNA

SEQ ID NO: 21767 - RNA, 121 nt, synthetic construct; identical to SEQ ID NO: 20634
  source 1..121: mol_type = other RNA

SEQ ID NO: 21768 - RNA, 122 nt, synthetic construct; identical to SEQ ID NO: 20635
  source 1..122: mol_type = other RNA

SEQ ID NO: 21769 - RNA, 123 nt, synthetic construct; identical to SEQ ID NO: 20636
  source 1..123: mol_type = other RNA

SEQ ID NO: 21770 - RNA, 100 nt, synthetic construct; identical to SEQ ID NO: 20817
  source 1..100: mol_type = other RNA

SEQ ID NO: 21771 - RNA, 100 nt, synthetic construct; identical to SEQ ID NO: 20818
  source 1..100: mol_type = other RNA

SEQ ID NO: 21772 - RNA, 100 nt, synthetic construct; identical to SEQ ID NO: 20819
  source 1..100: mol_type = other RNA

SEQ ID NO: 21773 - RNA, 100 nt, synthetic construct; identical to SEQ ID NO: 20820
  source 1..100: mol_type = other RNA

SEQ ID NO: 21774 - RNA, 100 nt, synthetic construct; identical to SEQ ID NO: 20821
  source 1..100: mol_type = other RNA

SEQ ID NO: 21775 - RNA, 100 nt, synthetic construct; identical to SEQ ID NO: 20822
  source 1..100: mol_type = other RNA

SEQ ID NO: 21776 - RNA, 100 nt, synthetic construct; identical to SEQ ID NO: 20823
  source 1..100: mol_type = other RNA

SEQ ID NO: 21777 - RNA, 100 nt, synthetic construct; identical to SEQ ID NO: 20613
  source 1..100: mol_type = other RNA

SEQ ID NO: 21778 - RNA, 100 nt, synthetic construct; identical to SEQ ID NO: 20825
  source 1..100: mol_type = other RNA

SEQ ID NO: 21779 - RNA, 100 nt, synthetic construct; identical to SEQ ID NO: 20826
  source 1..100: mol_type = other RNA

SEQ ID NO: 21780 - RNA, 100 nt, synthetic construct; identical to SEQ ID NO: 20827
  source 1..100: mol_type = other RNA

SEQ ID NO: 21781 - RNA, 100 nt, synthetic construct; identical to SEQ ID NO: 20828
  source 1..100: mol_type = other RNA

SEQ ID NO: 21782 - RNA, 100 nt, synthetic construct; identical to SEQ ID NO: 20829
  source 1..100: mol_type = other RNA

SEQ ID NO: 21783 - RNA, 100 nt, synthetic construct; identical to SEQ ID NO: 20830
  source 1..100: mol_type = other RNA

SEQ ID NO: 21784 - RNA, 100 nt, synthetic construct; identical to SEQ ID NO: 20831
  source 1..100: mol_type = other RNA

SEQ ID NO: 21785 - RNA, 100 nt, synthetic construct; identical to SEQ ID NO: 20832
  source 1..100: mol_type = other RNA

SEQ ID NO: 21786 - RNA, 100 nt, synthetic construct; identical to SEQ ID NO: 20833
  source 1..100: mol_type = other RNA

SEQ ID NO: 21787 - RNA, 100 nt, synthetic construct; identical to SEQ ID NO: 20834
  source 1..100: mol_type = other RNA

SEQ ID NO: 21788 - RNA, 100 nt, synthetic construct; identical to SEQ ID NO: 20835
  source 1..100: mol_type = other RNA

SEQ ID NO: 21789 - RNA, 100 nt, synthetic construct; identical to SEQ ID NO: 20836
  source 1..100: mol_type = other RNA

SEQ ID NO: 21790 - RNA, 100 nt, synthetic construct; identical to SEQ ID NO: 20837
  source 1..100: mol_type = other RNA

SEQ ID NO: 21791 - RNA, 100 nt, synthetic construct; identical to SEQ ID NO: 20838
  source 1..100: mol_type = other RNA

SEQ ID NO: 21792 - RNA, 100 nt, synthetic construct; identical to SEQ ID NO: 20839
  source 1..100: mol_type = other RNA

SEQ ID NO: 21793 - RNA, 100 nt, synthetic construct; identical to SEQ ID NO: 20840
  source 1..100: mol_type = other RNA

SEQ ID NO: 21794 - RNA, 120 nt, synthetic construct; identical to SEQ ID NO: 20606
  source 1..120: mol_type = other RNA

SEQ ID NO: 21795 - RNA, 120 nt, synthetic construct; identical to SEQ ID NO: 20842
  source 1..120: mol_type = other RNA

SEQ ID NO: 21796 - RNA, 120 nt, synthetic construct; identical to SEQ ID NO: 20843
  source 1..120: mol_type = other RNA

SEQ ID NO: 21797 - RNA, 120 nt, synthetic construct; identical to SEQ ID NO: 20844
  source 1..120: mol_type = other RNA

SEQ ID NO: 21798 - RNA, 120 nt, synthetic construct; identical to SEQ ID NO: 20845
  source 1..120: mol_type = other RNA

SEQ ID NO: 21799 - RNA, 120 nt, synthetic construct; identical to SEQ ID NO: 20846
  source 1..120: mol_type = other RNA

SEQ ID NO: 21800 - RNA, 120 nt, synthetic construct; identical to SEQ ID NO: 20847
  source 1..120: mol_type = other RNA

SEQ ID NO: 21801 - RNA, 120 nt, synthetic construct; identical to SEQ ID NO: 20848
  source 1..120: mol_type = other RNA

SEQ ID NO: 21802 - RNA, 120 nt, synthetic construct; identical to SEQ ID NO: 20849
  source 1..120: mol_type = other RNA

SEQ ID NO: 21803 - RNA, 120 nt, synthetic construct; identical to SEQ ID NO: 20850
  source 1..120: mol_type = other RNA

SEQ ID NO: 21804 - RNA, 120 nt, synthetic construct; identical to SEQ ID NO: 20851
  source 1..120: mol_type = other RNA

SEQ ID NO: 21805 - RNA, 120 nt, synthetic construct; identical to SEQ ID NO: 20852
  source 1..120: mol_type = other RNA

SEQ ID NO: 21806 - RNA, 120 nt, synthetic construct; identical to SEQ ID NO: 20853
  source 1..120: mol_type = other RNA

SEQ ID NO: 21807 - RNA, 120 nt, synthetic construct; identical to SEQ ID NO: 20854
  source 1..120: mol_type = other RNA

SEQ ID NO: 21808 - RNA, 120 nt, synthetic construct; identical to SEQ ID NO: 20855
  source 1..120: mol_type = other RNA

SEQ ID NO: 21809 - RNA, 120 nt, synthetic construct; identical to SEQ ID NO: 20856
  source 1..120: mol_type = other RNA

SEQ ID NO: 21810 - RNA, 124 nt, synthetic construct; identical to SEQ ID NO: 20611
  source 1..124: mol_type = other RNA

SEQ ID NO: 21811 - RNA, 124 nt, synthetic construct; identical to SEQ ID NO: 20858
  source 1..124: mol_type = other RNA

SEQ ID NO: 21812 - RNA, 124 nt, synthetic construct; identical to SEQ ID NO: 20859
  source 1..124: mol_type = other RNA

SEQ ID NO: 21813 - RNA, 124 nt, synthetic construct; identical to SEQ ID NO: 20860
  source 1..124: mol_type = other RNA

SEQ ID NO: 21814 - RNA, 124 nt, synthetic construct; identical to SEQ ID NO: 20861
  source 1..124: mol_type = other RNA

SEQ ID NO: 21815 - RNA, 124 nt, synthetic construct; identical to SEQ ID NO: 20862
  source 1..124: mol_type = other RNA

SEQ ID NO: 21816 - RNA, 124 nt, synthetic construct; identical to SEQ ID NO: 20863
  source 1..124: mol_type = other RNA

SEQ ID NO: 21817 - RNA, 124 nt, synthetic construct; identical to SEQ ID NO: 20864
  source 1..124: mol_type = other RNA

SEQ ID NO: 21818 - RNA, 124 nt, synthetic construct; identical to SEQ ID NO: 20865
  source 1..124: mol_type = other RNA

SEQ ID NO: 21819 - RNA, 124 nt, synthetic construct; identical to SEQ ID NO: 20866
  source 1..124: mol_type = other RNA

SEQ ID NO: 21820 - RNA, 124 nt, synthetic construct; identical to SEQ ID NO: 20867
  source 1..124: mol_type = other RNA

SEQ ID NO: 21821 - RNA, 124 nt, synthetic construct; identical to SEQ ID NO: 20868
  source 1..124: mol_type = other RNA

SEQ ID NO: 21822 - RNA, 124 nt, synthetic construct; identical to SEQ ID NO: 20869
  source 1..124: mol_type = other RNA

SEQ ID NO: 21823 - RNA, 124 nt, synthetic construct; identical to SEQ ID NO: 20870
  source 1..124: mol_type = other RNA

SEQ ID NO: 21824 - RNA, 124 nt, synthetic construct; identical to SEQ ID NO: 20871
  source 1..124: mol_type = other RNA

SEQ ID NO: 21825 - RNA, 124 nt, synthetic construct; identical to SEQ ID NO: 20872
  source 1..124: mol_type = other RNA

SEQ ID NO: 21826 - RNA, 126 nt, synthetic construct; identical to SEQ ID NO: 20873
  source 1..126: mol_type = other RNA

SEQ ID NO: 21827 - RNA, 126 nt, synthetic construct; identical to SEQ ID NO: 20874
  source 1..126: mol_type = other RNA

SEQ ID NO: 21828 - RNA, 126 nt, synthetic construct; identical to SEQ ID NO: 20875
  source 1..126: mol_type = other RNA

SEQ ID NO: 21829 - RNA, 126 nt, synthetic construct; identical to SEQ ID NO: 20876
  source 1..126: mol_type = other RNA

SEQ ID NO: 21830 - RNA, 126 nt, synthetic construct; identical to SEQ ID NO: 20877
  source 1..126: mol_type = other RNA

SEQ ID NO: 21831 - RNA, 126 nt, synthetic construct; identical to SEQ ID NO: 20878
  source 1..126: mol_type = other RNA

SEQ ID NO: 21832 - RNA, 126 nt, synthetic construct; identical to SEQ ID NO: 20879
  source 1..126: mol_type = other RNA

SEQ ID NO: 21833 - RNA, 126 nt, synthetic construct; identical to SEQ ID NO: 20880
  source 1..126: mol_type = other RNA

SEQ ID NO: 21834 - RNA, 126 nt, synthetic construct; identical to SEQ ID NO: 20881
  source 1..126: mol_type = other RNA

SEQ ID NO: 21835 - RNA, 126 nt, synthetic construct; identical to SEQ ID NO: 20882
  source 1..126: mol_type = other RNA

SEQ ID NO: 21836 - RNA, 126 nt, synthetic construct; identical to SEQ ID NO: 20883
  source 1..126: mol_type = other RNA

SEQ ID NO: 21837 - RNA, 126 nt, synthetic construct; identical to SEQ ID NO: 20884
  source 1..126: mol_type = other RNA

SEQ ID NO: 21838 - RNA, 126 nt, synthetic construct; identical to SEQ ID NO: 20885
  source 1..126: mol_type = other RNA

SEQ ID NO: 21839 - RNA, 126 nt, synthetic construct; identical to SEQ ID NO: 20886
  source 1..126: mol_type = other RNA

SEQ ID NO: 21840 - RNA, 126 nt, synthetic construct; identical to SEQ ID NO: 20887
  source 1..126: mol_type = other RNA

SEQ ID NO: 21841 - RNA, 126 nt, synthetic construct; identical to SEQ ID NO: 20888
  source 1..126: mol_type = other RNA

SEQ ID NO: 21842 - RNA, 128 nt, synthetic construct; identical to SEQ ID NO: 20889
  source 1..128: mol_type = other RNA

SEQ ID NO: 21843 - RNA, 128 nt, synthetic construct; identical to SEQ ID NO: 20890
  source 1..128: mol_type = other RNA

SEQ ID NO: 21844 - RNA, 128 nt, synthetic construct; identical to SEQ ID NO: 20891
  source 1..128: mol_type = other RNA

SEQ ID NO: 21845 - RNA, 128 nt, synthetic construct; identical to SEQ ID NO: 20892
  source 1..128: mol_type = other RNA

SEQ ID NO: 21846 - RNA, 128 nt, synthetic construct; identical to SEQ ID NO: 20893
  source 1..128: mol_type = other RNA

SEQ ID NO: 21847 - RNA, 128 nt, synthetic construct; identical to SEQ ID NO: 20894
  source 1..128: mol_type = other RNA

SEQ ID NO: 21848 - RNA, 128 nt, synthetic construct; identical to SEQ ID NO: 20895
  source 1..128: mol_type = other RNA

SEQ ID NO: 21849 - RNA, 128 nt, synthetic construct; identical to SEQ ID NO: 20896
  source 1..128: mol_type = other RNA

SEQ ID NO: 21850 - RNA, 128 nt, synthetic construct; identical to SEQ ID NO: 20897
  source 1..128: mol_type = other RNA

SEQ ID NO: 21851 - RNA, 128 nt, synthetic construct; identical to SEQ ID NO: 20898
  source 1..128: mol_type = other RNA

SEQ ID NO: 21852 - RNA, 128 nt, synthetic construct; identical to SEQ ID NO: 20899
  source 1..128: mol_type = other RNA

SEQ ID NO: 21853 - RNA, 128 nt, synthetic construct; identical to SEQ ID NO: 20900
  source 1..128: mol_type = other RNA

SEQ ID NO: 21854 - RNA, 128 nt, synthetic construct; identical to SEQ ID NO: 20901
  source 1..128: mol_type = other RNA

SEQ ID NO: 21855 - RNA, 128 nt, synthetic construct; identical to SEQ ID NO: 20902
  source 1..128: mol_type = other RNA

SEQ ID NO: 21856 - RNA, 128 nt, synthetic construct; identical to SEQ ID NO: 20903
  source 1..128: mol_type = other RNA

SEQ ID NO: 21857 - RNA, 128 nt, synthetic construct; identical to SEQ ID NO: 20904
  source 1..128: mol_type = other RNA

SEQ ID NO: 21858 - RNA, 130 nt, synthetic construct; identical to SEQ ID NO: 20905
  source 1..130: mol_type = other RNA

SEQ ID NO: 21859 - RNA, 130 nt, synthetic construct; identical to SEQ ID NO: 20906
  source 1..130: mol_type = other RNA

SEQ ID NO: 21860 - RNA, 130 nt, synthetic construct; identical to SEQ ID NO: 20907
  source 1..130: mol_type = other RNA

SEQ ID NO: 21861 - RNA, 130 nt, synthetic construct; identical to SEQ ID NO: 20908
  source 1..130: mol_type = other RNA

SEQ ID NO: 21862 - RNA, 130 nt, synthetic construct; identical to SEQ ID NO: 20909
  source 1..130: mol_type = other RNA

SEQ ID NO: 21863 - RNA, 130 nt, synthetic construct; identical to SEQ ID NO: 20910
  source 1..130: mol_type = other RNA

SEQ ID NO: 21864 - RNA, 130 nt, synthetic construct; identical to SEQ ID NO: 20911
  source 1..130: mol_type = other RNA

SEQ ID NO: 21865 - RNA, 130 nt, synthetic construct; identical to SEQ ID NO: 20912
  source 1..130: mol_type = other RNA

SEQ ID NO: 21866 - RNA, 130 nt, synthetic construct; identical to SEQ ID NO: 20913
  source 1..130: mol_type = other RNA

SEQ ID NO: 21867 - RNA, 130 nt, synthetic construct; identical to SEQ ID NO: 20914
  source 1..130: mol_type = other RNA

SEQ ID NO: 21868 - RNA, 130 nt, synthetic construct; identical to SEQ ID NO: 20915
  source 1..130: mol_type = other RNA

SEQ ID NO: 21869 - RNA, 130 nt, synthetic construct; identical to SEQ ID NO: 20916
  source 1..130: mol_type = other RNA

SEQ ID NO: 21870 - RNA, 130 nt, synthetic construct; identical to SEQ ID NO: 20917
  source 1..130: mol_type = other RNA

SEQ ID NO: 21871 - RNA, 130 nt, synthetic construct; identical to SEQ ID NO: 20918
  source 1..130: mol_type = other RNA

SEQ ID NO: 21872 - RNA, 130 nt, synthetic construct; identical to SEQ ID NO: 20919
  source 1..130: mol_type = other RNA

SEQ ID NO: 21873 - RNA, 130 nt, synthetic construct; identical to SEQ ID NO: 20920
  source 1..130: mol_type = other RNA

SEQ ID NO: 21874 - RNA, 130 nt, synthetic construct; identical to SEQ ID NO: 20921
  source 1..130: mol_type = other RNA

SEQ ID NO: 21875 - RNA, 130 nt, synthetic construct; identical to SEQ ID NO: 20922
  source 1..130: mol_type = other RNA

SEQ ID NO: 21876 - RNA, 121 nt, synthetic construct; identical to SEQ ID NO: 20634
  source 1..121: mol_type = other RNA

SEQ ID NO: 21877 - RNA, 121 nt, synthetic construct; identical to SEQ ID NO: 20924
  source 1..121: mol_type = other RNA

SEQ ID NO: 21878 - RNA, 121 nt, synthetic construct; identical to SEQ ID NO: 20925
  source 1..121: mol_type = other RNA

SEQ ID NO: 21879 - RNA, 121 nt, synthetic construct; identical to SEQ ID NO: 20926
  source 1..121: mol_type = other RNA

SEQ ID NO: 21880 - RNA, 121 nt, synthetic construct; identical to SEQ ID NO: 20927
  source 1..121: mol_type = other RNA

SEQ ID NO: 21881 - RNA, 121 nt, synthetic construct; identical to SEQ ID NO: 20928
  source 1..121: mol_type = other RNA

SEQ ID NO: 21882 - RNA, 121 nt, synthetic construct; identical to SEQ ID NO: 20929
  source 1..121: mol_type = other RNA

SEQ ID NO: 21883 - RNA, 121 nt, synthetic construct; identical to SEQ ID NO: 20930
  source 1..121: mol_type = other RNA

SEQ ID NO: 21884 - RNA, 121 nt, synthetic construct; identical to SEQ ID NO: 20931
  source 1..121: mol_type = other RNA

SEQ ID NO: 21885 - RNA, 121 nt, synthetic construct; identical to SEQ ID NO: 20932
  source 1..121: mol_type = other RNA

SEQ ID NO: 21886 - RNA, 121 nt, synthetic construct; identical to SEQ ID NO: 20933
  source 1..121: mol_type = other RNA

SEQ ID NO: 21887 - RNA, 121 nt, synthetic construct; identical to SEQ ID NO: 20934
  source 1..121: mol_type = other RNA

SEQ ID NO: 21888 - RNA, 121 nt, synthetic construct; identical to SEQ ID NO: 20935
  source 1..121: mol_type = other RNA

SEQ ID NO: 21889 - RNA, 121 nt, synthetic construct; identical to SEQ ID NO: 20936
  source 1..121: mol_type = other RNA

SEQ ID NO: 21890 - RNA, 121 nt, synthetic construct; identical to SEQ ID NO: 20937
  source 1..121: mol_type = other RNA

SEQ ID NO: 21891 - RNA, 121 nt, synthetic construct; identical to SEQ ID NO: 20938
  source 1..121: mol_type = other RNA

SEQ ID NO: 21892 - RNA, 120 nt, synthetic construct; identical to SEQ ID NO: 20842
  source 1..120: mol_type = other RNA

SEQ ID NO: 21893 - RNA, 120 nt, synthetic construct; identical to SEQ ID NO: 20940
  source 1..120: mol_type = other RNA

SEQ ID NO: 21894 - RNA, 121 nt, synthetic construct; identical to SEQ ID NO: 20941
  source 1..121: mol_type = other RNA

SEQ ID NO: 21895 - RNA, 121 nt, synthetic construct; identical to SEQ ID NO: 20477
  source 1..121: mol_type = other RNA

SEQ ID NO: 21896 - RNA, 121 nt, synthetic construct; identical to SEQ ID NO: 20943
  source 1..121: mol_type = other RNA

SEQ ID NO: 21897 - RNA, 121 nt, synthetic construct; identical to SEQ ID NO: 20944
  source 1..121: mol_type = other RNA

SEQ ID NO: 21898 - RNA, 121 nt, synthetic construct; identical to SEQ ID NO: 20945
  source 1..121: mol_type = other RNA

SEQ ID NO: 21899 - RNA, 121 nt, synthetic construct; identical to SEQ ID NO: 20946
  source 1..121: mol_type = other RNA

SEQ ID NO: 21900 - RNA, 121 nt, synthetic construct; identical to SEQ ID NO: 20947
  source 1..121: mol_type = other RNA

SEQ ID NO: 21901 - RNA, 121 nt, synthetic construct; identical to SEQ ID NO: 20948
  source 1..121: mol_type = other RNA

SEQ ID NO: 21902 - RNA, 121 nt, synthetic construct; identical to SEQ ID NO: 20949
  source 1..121: mol_type = other RNA

SEQ ID NO: 21903 - RNA, 121 nt, synthetic construct; identical to SEQ ID NO: 20950
  source 1..121: mol_type = other RNA

SEQ ID NO: 21904 - RNA, 120 nt, synthetic construct; identical to SEQ ID NO: 20951
  source 1..120: mol_type = other RNA

SEQ ID NO: 21905 - RNA, 120 nt, synthetic construct; identical to SEQ ID NO: 20952
  source 1..120: mol_type = other RNA

SEQ ID NO: 21906 - DNA, 23 bp, synthetic construct
  source 1..23: mol_type = other DNA
ccatggtgcacctgactcctgcg

SEQ ID NO: 21907 - RNA, 133 nt, synthetic construct; identical to SEQ ID NO: 20421
  source 1..133: mol_type = other RNA

SEQ ID NO: 21908 - RNA, 132 nt, synthetic construct; identical to SEQ ID NO: 20422
  source 1..132: mol_type = other RNA

SEQ ID NO: 21909 - RNA, 131 nt, synthetic construct; identical to SEQ ID NO: 20423
  source 1..131: mol_type = other RNA

SEQ ID NO: 21910 - RNA, 130 nt, synthetic construct; identical to SEQ ID NO: 20424
  source 1..130: mol_type = other RNA

SEQ ID NO: 21911 - RNA, 129 nt, synthetic construct; identical to SEQ ID NO: 20425
  source 1..129: mol_type = other RNA

SEQ ID NO: 21912 - RNA, 128 nt, synthetic construct; identical to SEQ ID NO: 20426
  source 1..128: mol_type = other RNA

SEQ ID NO: 21913 - RNA, 127 nt, synthetic construct; identical to SEQ ID NO: 20427
  source 1..127: mol_type = other RNA

SEQ ID NO: 21914 - RNA, 126 nt, synthetic construct; identical to SEQ ID NO: 20428
  source 1..126: mol_type = other RNA

SEQ ID NO: 21915 - RNA, 125 nt, synthetic construct; identical to SEQ ID NO: 20429
  source 1..125: mol_type = other RNA

SEQ ID NO: 21916 - RNA, 124 nt, synthetic construct; identical to SEQ ID NO: 20430
  source 1..124: mol_type = other RNA

SEQ ID NO: 21917 - RNA, 132 nt, synthetic construct; identical to SEQ ID NO: 20431
  source 1..132: mol_type = other RNA

SEQ ID NO: 21918 - RNA, 131 nt, synthetic construct; identical to SEQ ID NO: 20432
  source 1..131: mol_type = other RNA

SEQ ID NO: 21919 - RNA, 130 nt, synthetic construct; identical to SEQ ID NO: 20433
  source 1..130: mol_type = other RNA

SEQ ID NO: 21920 - RNA, 129 nt, synthetic construct; identical to SEQ ID NO: 20434
  source 1..129: mol_type = other RNA

SEQ ID NO: 21921 - RNA, 128 nt, synthetic construct; identical to SEQ ID NO: 20435
  source 1..128: mol_type = other RNA

SEQ ID NO: 21922 - RNA, 127 nt, synthetic construct; identical to SEQ ID NO: 20436
  source 1..127: mol_type = other RNA

SEQ ID NO: 21923 - RNA, 126 nt, synthetic construct; identical to SEQ ID NO: 20437
  source 1..126: mol_type = other RNA

SEQ ID NO: 21924 - RNA, 125 nt, synthetic construct; identical to SEQ ID NO: 20438
  source 1..125: mol_type = other RNA

SEQ ID NO: 21925 - RNA, 124 nt, synthetic construct; identical to SEQ ID NO: 20439
  source 1..124: mol_type = other RNA

SEQ ID NO: 21926 - RNA, 123 nt, synthetic construct; identical to SEQ ID NO: 20440
  source 1..123: mol_type = other RNA

SEQ ID NO: 21927 - RNA, 131 nt, synthetic construct; identical to SEQ ID NO: 20441
  source 1..131: mol_type = other RNA

SEQ ID NO: 21928 - RNA, 130 nt, synthetic construct; identical to SEQ ID NO: 20442
  source 1..130: mol_type = other RNA

SEQ ID NO: 21929 - RNA, 129 nt, synthetic construct; identical to SEQ ID NO: 20443
  source 1..129: mol_type = other RNA

SEQ ID NO: 21930 - RNA, 128 nt, synthetic construct; identical to SEQ ID NO: 20444
  source 1..128: mol_type = other RNA

SEQ ID NO: 21931 - RNA, 127 nt, synthetic construct; identical to SEQ ID NO: 20445
  source 1..127: mol_type = other RNA

SEQ ID NO: 21932 - RNA, 126 nt, synthetic construct; identical to SEQ ID NO: 20446
  source 1..126: mol_type = other RNA

SEQ ID NO: 21933 - RNA, 125 nt, synthetic construct; identical to SEQ ID NO: 20447
  source 1..125: mol_type = other RNA

SEQ ID NO: 21934 - RNA, 124 nt, synthetic construct; identical to SEQ ID NO: 20448
  source 1..124: mol_type = other RNA

SEQ ID NO: 21935 - RNA, 123 nt, synthetic construct; identical to SEQ ID NO: 20449
  source 1..123: mol_type = other RNA

SEQ ID NO: 21936 - RNA, 122 nt, synthetic construct; identical to SEQ ID NO: 20450
  source 1..122: mol_type = other RNA

SEQ ID NO: 21937 - RNA, 130 nt, synthetic construct; identical to SEQ ID NO: 20451
  source 1..130: mol_type = other RNA

SEQ ID NO: 21938 - RNA, 129 nt, synthetic construct; identical to SEQ ID NO: 20452
  source 1..129: mol_type = other RNA

SEQ ID NO: 21939 - RNA, 128 nt, synthetic construct; identical to SEQ ID NO: 20453
  source 1..128: mol_type = other RNA

SEQ ID NO: 21940 - RNA, 127 nt, synthetic construct; identical to SEQ ID NO: 20454
  source 1..127: mol_type = other RNA

SEQ ID NO: 21941 - RNA, 126 nt, synthetic construct; identical to SEQ ID NO: 20455
  source 1..126: mol_type = other RNA

SEQ ID NO: 21942 - RNA, 125 nt, synthetic construct; identical to SEQ ID NO: 20456
  source 1..125: mol_type = other RNA

SEQ ID NO: 21943 - RNA, 124 nt, synthetic construct; identical to SEQ ID NO: 20457
  source 1..124: mol_type = other RNA

SEQ ID NO: 21944 - RNA, 123 nt, synthetic construct; identical to SEQ ID NO: 20458
  source 1..123: mol_type = other RNA

SEQ ID NO: 21945 - RNA, 122 nt, synthetic construct; identical to SEQ ID NO: 20459
  source 1..122: mol_type = other RNA

SEQ ID NO: 21946 - RNA, 121 nt, synthetic construct; identical to SEQ ID NO: 20460
  source 1..121: mol_type = other RNA

SEQ ID NO: 21947 - RNA, 129 nt, synthetic construct; identical to SEQ ID NO: 20461
  source 1..129: mol_type = other RNA

SEQ ID NO: 21948 - RNA, 128 nt, synthetic construct; identical to SEQ ID NO: 20462
  source 1..128: mol_type = other RNA

SEQ ID NO: 21949 - RNA, 127 nt, synthetic construct; identical to SEQ ID NO: 20463
  source 1..127: mol_type = other RNA

SEQ ID NO: 21950 - RNA, 126 nt, synthetic construct; identical to SEQ ID NO: 20464
  source 1..126: mol_type = other RNA

SEQ ID NO: 21951 - RNA, 125 nt, synthetic construct; identical to SEQ ID NO: 20465
  source 1..125: mol_type = other RNA

SEQ ID NO: 21952 - RNA, 124 nt, synthetic construct; identical to SEQ ID NO: 20466
  source 1..124: mol_type = other RNA

SEQ ID NO: 21953 - RNA, 123 nt, synthetic construct; identical to SEQ ID NO: 20467
  source 1..123: mol_type = other RNA

SEQ ID NO: 21954 - RNA, 122 nt, synthetic construct; identical to SEQ ID NO: 20468
  source 1..122: mol_type = other RNA

SEQ ID NO: 21955 - RNA, 121 nt, synthetic construct; identical to SEQ ID NO: 20469
  source 1..121: mol_type = other RNA

SEQ ID NO: 21956 - RNA, 120 nt, synthetic construct; identical to SEQ ID NO: 20470
  source 1..120: mol_type = other RNA

SEQ ID NO: 21957 - RNA, 127 nt, synthetic construct; identical to SEQ ID NO: 20471
  source 1..127: mol_type = other RNA

SEQ ID NO: 21958 - RNA, 126 nt, synthetic construct; identical to SEQ ID NO: 20472
  source 1..126: mol_type = other RNA

SEQ ID NO: 21959 - RNA, 125 nt, synthetic construct; identical to SEQ ID NO: 20473
  source 1..125: mol_type = other RNA

SEQ ID NO: 21960 - RNA, 124 nt, synthetic construct; identical to SEQ ID NO: 20474
  source 1..124: mol_type = other RNA

SEQ ID NO: 21961 - RNA, 123 nt, synthetic construct; identical to SEQ ID NO: 20475
  source 1..123: mol_type = other RNA

SEQ ID NO: 21962 - RNA, 122 nt, synthetic construct; identical to SEQ ID NO: 20476
  source 1..122: mol_type = other RNA

SEQ ID NO: 21963 - RNA, 121 nt, synthetic construct; identical to SEQ ID NO: 20477
  source 1..121: mol_type = other RNA

SEQ ID NO: 21964 - RNA, 120 nt, synthetic construct; identical to SEQ ID NO: 20478
  source 1..120: mol_type = other RNA

SEQ ID NO: 21965 - RNA, 119 nt, synthetic construct; identical to SEQ ID NO: 20479
  source 1..119: mol_type = other RNA

SEQ ID NO: 21966 - RNA, 118 nt, synthetic construct; identical to SEQ ID NO: 20480
  source 1..118: mol_type = other RNA

SEQ ID NO: 21967 - RNA, 124 nt, synthetic construct; identical to SEQ ID NO: 20481
  source 1..124: mol_type = other RNA

SEQ ID NO: 21968 - RNA, 123 nt, synthetic construct; identical to SEQ ID NO: 20482
  source 1..123: mol_type = other RNA

SEQ ID NO: 21969 - RNA, 122 nt, synthetic construct; identical to SEQ ID NO: 20483
  source 1..122: mol_type = other RNA

SEQ ID NO: 21970 - RNA, 121 nt, synthetic construct; identical to SEQ ID NO: 20484
  source 1..121: mol_type = other RNA

SEQ ID NO: 21971 - RNA, 120 nt, synthetic construct; identical to SEQ ID NO: 20485
  source 1..120: mol_type = other RNA

SEQ ID NO: 21972 - RNA, 119 nt, synthetic construct; identical to SEQ ID NO: 20486
  source 1..119: mol_type = other RNA

SEQ ID NO: 21973 - RNA, 118 nt, synthetic construct; identical to SEQ ID NO: 20487
  source 1..118: mol_type = other RNA

SEQ ID NO: 21974 - RNA, 117 nt, synthetic construct; identical to SEQ ID NO: 20488
  source 1..117: mol_type = other RNA

SEQ ID NO: 21975 - RNA, 116 nt, synthetic construct; identical to SEQ ID NO: 20489
  source 1..116: mol_type = other RNA

SEQ ID NO: 21976 - RNA, 115 nt, synthetic construct; identical to SEQ ID NO: 20490
  source 1..115: mol_type = other RNA

SEQ ID NO: 21977 - RNA, 123 nt, synthetic construct; identical to SEQ ID NO: 20491
  source 1..123: mol_type = other RNA

SEQ ID NO: 21978 - RNA, 122 nt, synthetic construct; identical to SEQ ID NO: 20492
  source 1..122: mol_type = other RNA

SEQ ID NO: 21979 - RNA, 121 nt, synthetic construct; identical to SEQ ID NO: 20493
  source 1..121: mol_type = other RNA

SEQ ID NO: 21980 - RNA, 120 nt, synthetic construct; identical to SEQ ID NO: 20494
  source 1..120: mol_type = other RNA

SEQ ID NO: 21981 - RNA, 119 nt, synthetic construct; identical to SEQ ID NO: 20495
  source 1..119: mol_type = other RNA

SEQ ID NO: 21982 - RNA, 118 nt, synthetic construct; identical to SEQ ID NO: 20496
  source 1..118: mol_type = other RNA

SEQ ID NO: 21983 - RNA, 117 nt, synthetic construct; identical to SEQ ID NO: 20497
  source 1..117: mol_type = other RNA

SEQ ID NO: 21984 - RNA, 116 nt, synthetic construct; identical to SEQ ID NO: 20498
  source 1..116: mol_type = other RNA

SEQ ID NO: 21985 - RNA, 115 nt, synthetic construct; identical to SEQ ID NO: 20499
  source 1..115: mol_type = other RNA

SEQ ID NO: 21986 - RNA, 114 nt, synthetic construct; identical to SEQ ID NO: 20500
  source 1..114: mol_type = other RNA

SEQ ID NO: 21987 - RNA, 122 nt, synthetic construct; identical to SEQ ID NO: 20501
  source 1..122: mol_type = other RNA

SEQ ID NO: 21988 - RNA, 121 nt, synthetic construct; identical to SEQ ID NO: 20502
  source 1..121: mol_type = other RNA

SEQ ID NO: 21989 - RNA, 120 nt, synthetic construct; identical to SEQ ID NO: 20503
  source 1..120: mol_type = other RNA

SEQ ID NO: 21990 - RNA, 119 nt, synthetic construct; identical to SEQ ID NO: 20504
  source 1..119: mol_type = other RNA

SEQ ID NO: 21991 - RNA, 118 nt, synthetic construct; identical to SEQ ID NO: 20505
  source 1..118: mol_type = other RNA

SEQ ID NO: 21992 - RNA, 117 nt, synthetic construct; identical to SEQ ID NO: 20506
  source 1..117: mol_type = other RNA

SEQ ID NO: 21993 - RNA, 116 nt, synthetic construct; identical to SEQ ID NO: 20507
  source 1..116: mol_type = other RNA

SEQ ID NO: 21994 - RNA, 115 nt, synthetic construct; identical to SEQ ID NO: 20508
  source 1..115: mol_type = other RNA

SEQ ID NO: 21995 - RNA, 114 nt, synthetic construct; identical to SEQ ID NO: 20509
  source 1..114: mol_type = other RNA

SEQ ID NO: 21996 - RNA, 113 nt, synthetic construct; identical to SEQ ID NO: 20510
  source 1..113: mol_type = other RNA

SEQ ID NO: 21997 - DNA, 124 bp, synthetic construct
  source 1..124: mol_type = other DNA
gcatggtgcacctgactcctggttttagagctagaaatagcaagttaaaataaggctagtccgttatcaacttgaaaaagtggcaccgagtcggtgcagacttctccacaggagtcaggtgcac

SEQ ID NO: 21998 - DNA, 118 bp, synthetic construct
  source 1..118: mol_type = other DNA
gtaacggcagacttctccacgttttagagctagaaatagcaagttaaaataaggctagtccgttatcaacttgaaaaagtgggaccgagtcggtccgactcctgaggagaagtctgcc

SEQ ID NO: 21999 - protein, 4 aa, unidentified
YADD

SEQ ID NO: 22000 - protein, 4 aa, unidentified
YMDD

SEQ ID NO: 22001 - protein, 4 aa, unidentified
YVDD

SEQ ID NO: 22002 - protein, 9 aa, unidentified
LAGLIDADG

SEQ ID NO: 22003 - protein, 6 aa, synthetic construct
IENSSP

SEQ ID NO: 22004 - RNA, 100 nt, synthetic construct
  source 1..100: mol_type = other RNA
  misc_difference 1..100: note = This sequence may encompass 5, 10, 20, 30, 50, 70, 100 nucleotides
aaaaaaaaaaaaaaaaaaaaaaaaaaaaaaaaaaaaaaaaaaaaaaaaaaaaaaaaaaaaaaaaaaaaaaaaaaaaaaaaaaaaaaaaaaaaaaaaaaaa

SEQ ID NO: 22005 - RNA, 121 nt, synthetic construct; identical to SEQ ID NO: 20634
  source 1..121: mol_type = other RNA
  modified_base 1: mod_base = OTHER; note = 2'-O-methyl guanosine phosphorothioate
  modified_base 2: mod_base = OTHER; note = 2'-O-methyl uridine phosphorothioate
  modified_base 3: mod_base = OTHER; note = 2'-O-methyl adenosine phosphorothioate
  modified_base 29: mod_base = OTHER; note = 2'-O-methyl guanosine
  modified_base 30: mod_base = OTHER; note = 2'-O-methyl cytidine
  modified_base 31: mod_base = OTHER; note = 2'-O-methyl uridine
  modified_base 32: mod_base = OTHER; note = 2'-O-methyl adenosine
  modified_base 33: mod_base = OTHER; note = 2'-O-methyl guanosine
  modified_base 34: mod_base = OTHER; note = 2'-O-methyl adenosine
  modified_base 35: mod_base = OTHER; note = 2'-O-methyl adenosine
  modified_base 36: mod_base = OTHER; note = 2'-O-methyl adenosine
  modified_base 37: mod_base = OTHER; note = 2'-O-methyl uridine
  modified_base 38: mod_base = OTHER; note = 2'-O-methyl adenosine
  modified_base 39: mod_base = OTHER; note = 2'-O-methyl guanosine
  modified_base 40: mod_base = OTHER; note = 2'-O-methyl cytidine
  modified_base 69: mod_base = OTHER; note = 2'-O-methyl adenosine
  modified_base 70: mod_base = OTHER; note = 2'-O-methyl cytidine
  modified_base 71: mod_base = OTHER; note = 2'-O-methyl uridine
  modified_base 72: mod_base = OTHER; note = 2'-O-methyl uridine
  modified_base 73: mod_base = OTHER; note = 2'-O-methyl guanosine
  modified_base 74: mod_base = OTHER; note = 2'-O-methyl adenosine
  modified_base 75: mod_base = OTHER; note = 2'-O-methyl adenosine
  modified_base 76: mod_base = OTHER; note = 2'-O-methyl adenosine
  modified_base 77: mod_base = OTHER; note = 2'-O-methyl adenosine
  modified_base 78: mod_base = OTHER; note = 2'-O-methyl adenosine
  modified_base 79: mod_base = OTHER; note = 2'-O-methyl guanosine
  modified_base 80: mod_base = OTHER; note = 2'-O-methyl uridine
  modified_base 81: mod_base = OTHER; note = 2'-O-methyl guanosine
  modified_base 82: mod_base = OTHER; note = 2'-O-methyl guanosine
  modified_base 83: mod_base = OTHER; note = 2'-O-methyl cytidine
  modified_base 84: mod_base = OTHER; note = 2'-O-methyl adenosine
  modified_base 85: mod_base = OTHER; note = 2'-O-methyl cytidine
  modified_base 86: mod_base = OTHER; note = 2'-O-methyl cytidine
  modified_base 87: mod_base = OTHER; note = 2'-O-methyl guanosine
  modified_base 88: mod_base = OTHER; note = 2'-O-methyl adenosine
  modified_base 89: mod_base = OTHER; note = 2'-O-methyl guanosine
  modified_base 90: mod_base = OTHER; note = 2'-O-methyl uridine
  modified_base 91: mod_base = OTHER; note = 2'-O-methyl cytidine
  modified_base 92: mod_base = OTHER; note = 2'-O-methyl guanosine
  modified_base 93: mod_base = OTHER; note = 2'-O-methyl guanosine
  modified_base 94: mod_base = OTHER; note = 2'-O-methyl uridine
  modified_base 95: mod_base = OTHER; note = 2'-O-methyl guanosine
  modified_base 96: mod_base = OTHER; note = 2'-O-methyl cytidine
  modified_base 118: mod_base = OTHER; note = cytidine phosphorothioate
  modified_base 119: mod_base = OTHER; note = 2'-O-methyl uridine phosphorothioate
  modified_base 120: mod_base = OTHER; note = 2'-O-methyl guanosine phosphorothioate
  modified_base 121: mod_base = OTHER; note = 2'-O-methyl cytidine
